United States Patent Application Publication US 2022/0073911 A1 - sequence listing, part 3

SEQ ID NO: 39113 - DNA, 76 bp, Artificial Sequence; identical to SEQ ID NO: 3247
  Description of Artificial Sequence: Synthetic Peanut control sequences; 5' sequence + inner sequence + 3' sequence

SEQ ID NO: 39114 - DNA, 76 bp, Artificial Sequence; identical to SEQ ID NO: 3377
  Description of Artificial Sequence: Synthetic Peanut control sequences; 5' sequence + inner sequence + 3' sequence

SEQ ID NO: 39115 - DNA, 75 bp, Artificial Sequence; identical to SEQ ID NO: 3251
  Description of Artificial Sequence: Synthetic Peanut control sequences; 5' sequence + inner sequence + 3' sequence

SEQ ID NO: 39116 - DNA, 76 bp, Artificial Sequence; identical to SEQ ID NO: 3065
  Description of Artificial Sequence: Synthetic Peanut control sequences; 5' sequence + inner sequence + 3' sequence

SEQ ID NO: 39117 - DNA, 76 bp, Artificial Sequence; identical to SEQ ID NO: 3117
  Description of Artificial Sequence: Synthetic Peanut control sequences; 5' sequence + inner sequence + 3' sequence

SEQ ID NO: 39118 - DNA, 76 bp, Artificial Sequence; identical to SEQ ID NO: 3389
  Description of Artificial Sequence: Synthetic Peanut control sequences; 5' sequence + inner sequence + 3' sequence

SEQ ID NO: 39119 - DNA, 76 bp, Artificial Sequence; identical to SEQ ID NO: 3147
  Description of Artificial Sequence: Synthetic Peanut control sequences; 5' sequence + inner sequence + 3' sequence

SEQ ID NO: 39120 - DNA, 76 bp, Artificial Sequence; identical to SEQ ID NO: 3349
  Description of Artificial Sequence: Synthetic Peanut control sequences; 5' sequence + inner sequence + 3' sequence

SEQ ID NO: 39121 - DNA, 76 bp, Artificial Sequence; identical to SEQ ID NO: 3168
  Description of Artificial Sequence: Synthetic Peanut control sequences; 5' sequence + inner sequence + 3' sequence

SEQ ID NO: 39122 - DNA, 76 bp, Artificial Sequence; identical to SEQ ID NO: 3182
  Description of Artificial Sequence: Synthetic Peanut control sequences; 5' sequence + inner sequence + 3' sequence

SEQ ID NO: 39123 - DNA, 76 bp, Artificial Sequence; identical to SEQ ID NO: 3290
  Description of Artificial Sequence: Synthetic Peanut control sequences; 5' sequence + inner sequence + 3' sequence

SEQ ID NO: 39124 - DNA, 76 bp, Artificial Sequence; identical to SEQ ID NO: 3096
  Description of Artificial Sequence: Synthetic Peanut control sequences; 5' sequence + inner sequence + 3' sequence

SEQ ID NO: 39125 - DNA, 76 bp, Artificial Sequence; identical to SEQ ID NO: 3310
  Description of Artificial Sequence: Synthetic Peanut control sequences; 5' sequence + inner sequence + 3' sequence

SEQ ID NO: 39126 - DNA, 76 bp, Artificial Sequence; identical to SEQ ID NO: 3243
  Description of Artificial Sequence: Synthetic Peanut control sequences; 5' sequence + inner sequence + 3' sequence

SEQ ID NO: 39127 - DNA, 76 bp, Artificial Sequence; identical to SEQ ID NO: 3496
  Description of Artificial Sequence: Synthetic Peanut control sequences; 5' sequence + inner sequence + 3' sequence

SEQ ID NO: 39128 - DNA, 76 bp, Artificial Sequence; identical to SEQ ID NO: 3262
  Description of Artificial Sequence: Synthetic Peanut control sequences; 5' sequence + inner sequence + 3' sequence

SEQ ID NO: 39129 - DNA, 76 bp, Artificial Sequence; identical to SEQ ID NO: 3383
  Description of Artificial Sequence: Synthetic Peanut control sequences; 5' sequence + inner sequence + 3' sequence

SEQ ID NO: 39130 - DNA, 76 bp, Artificial Sequence; identical to SEQ ID NO: 3293
  Description of Artificial Sequence: Synthetic Peanut control sequences; 5' sequence + inner sequence + 3' sequence

SEQ ID NO: 39131 - DNA, 76 bp, Artificial Sequence; identical to SEQ ID NO: 3191
  Description of Artificial Sequence: Synthetic Peanut control sequences; 5' sequence + inner sequence + 3' sequence

SEQ ID NO: 39132 - DNA, 76 bp, Artificial Sequence; identical to SEQ ID NO: 3116
  Description of Artificial Sequence: Synthetic Peanut control sequences; 5' sequence + inner sequence + 3' sequence

SEQ ID NO: 39133 - DNA, 76 bp, Artificial Sequence; identical to SEQ ID NO: 3085
  Description of Artificial Sequence: Synthetic Peanut control sequences; 5' sequence + inner sequence + 3' sequence

SEQ ID NO: 39134 - DNA, 76 bp, Artificial Sequence; identical to SEQ ID NO: 3394
  Description of Artificial Sequence: Synthetic Peanut control sequences; 5' sequence + inner sequence + 3' sequence

SEQ ID NO: 39135 - DNA, 76 bp, Artificial Sequence; identical to SEQ ID NO: 3128
  Description of Artificial Sequence: Synthetic Peanut control sequences; 5' sequence + inner sequence + 3' sequence

SEQ ID NO: 39136 - DNA, 76 bp, Artificial Sequence; identical to SEQ ID NO: 3430
  Description of Artificial Sequence: Synthetic Peanut control sequences; 5' sequence + inner sequence + 3' sequence

SEQ ID NO: 39137 - DNA, 76 bp, Artificial Sequence; identical to SEQ ID NO: 3271
  Description of Artificial Sequence: Synthetic Peanut control sequences; 5' sequence + inner sequence + 3' sequence

SEQ ID NO: 39138 - DNA, 76 bp, Artificial Sequence; identical to SEQ ID NO: 3229
  Description of Artificial Sequence: Synthetic Peanut control sequences; 5' sequence + inner sequence + 3' sequence

SEQ ID NO: 39139 - DNA, 76 bp, Artificial Sequence; identical to SEQ ID NO: 3429
  Description of Artificial Sequence: Synthetic Peanut control sequences; 5' sequence + inner sequence + 3' sequence

SEQ ID NO: 39140 - DNA, 76 bp, Artificial Sequence; identical to SEQ ID NO: 3118
  Description of Artificial Sequence: Synthetic Peanut control sequences; 5' sequence + inner sequence + 3' sequence

SEQ ID NO: 39141 - DNA, 77 bp, Artificial Sequence; identical to SEQ ID NO: 3150
  Description of Artificial Sequence: Synthetic Peanut control sequences; 5' sequence + inner sequence + 3' sequence

SEQ ID NO: 39142 - DNA, 76 bp, Artificial Sequence; identical to SEQ ID NO: 3218
  Description of Artificial Sequence: Synthetic Peanut control sequences; 5' sequence + inner sequence + 3' sequence

SEQ ID NO: 39143 - DNA, 76 bp, Artificial Sequence; identical to SEQ ID NO: 3311
  Description of Artificial Sequence: Synthetic Peanut control sequences; 5' sequence + inner sequence + 3' sequence

SEQ ID NO: 39144 - DNA, 76 bp, Artificial Sequence; identical to SEQ ID NO: 3115
  Description of Artificial Sequence: Synthetic Peanut control sequences; 5' sequence + inner sequence + 3' sequence

SEQ ID NO: 39145 - DNA, 76 bp, Artificial Sequence; identical to SEQ ID NO: 3201
  Description of Artificial Sequence: Synthetic Peanut control sequences; 5' sequence + inner sequence + 3' sequence

SEQ ID NO: 39146 - DNA, 76 bp, Artificial Sequence; identical to SEQ ID NO: 3155
  Description of Artificial Sequence: Synthetic Peanut control sequences; 5' sequence + inner sequence + 3' sequence

SEQ ID NO: 39147 - DNA, 76 bp, Artificial Sequence; identical to SEQ ID NO: 3068
  Description of Artificial Sequence: Synthetic Peanut control sequences; 5' sequence + inner sequence + 3' sequence

SEQ ID NO: 39148 - DNA, 76 bp, Artificial Sequence; identical to SEQ ID NO: 3468
  Description of Artificial Sequence: Synthetic Peanut control sequences; 5' sequence + inner sequence + 3' sequence

SEQ ID NO: 39149 - DNA, 76 bp, Artificial Sequence; identical to SEQ ID NO: 3253
  Description of Artificial Sequence: Synthetic Peanut control sequences; 5' sequence + inner sequence + 3' sequence

SEQ ID NO: 39150 - DNA, 76 bp, Artificial Sequence; identical to SEQ ID NO: 3200
  Description of Artificial Sequence: Synthetic Peanut control sequences; 5' sequence + inner sequence + 3' sequence

SEQ ID NO: 39151 - DNA, 76 bp, Artificial Sequence; identical to SEQ ID NO: 3113
  Description of Artificial Sequence: Synthetic Peanut control sequences; 5' sequence + inner sequence + 3' sequence

SEQ ID NO: 39152 - DNA, 76 bp, Artificial Sequence; identical to SEQ ID NO: 3099
  Description of Artificial Sequence: Synthetic Peanut control sequences; 5' sequence + inner sequence + 3' sequence

SEQ ID NO: 39153 - DNA, 76 bp, Artificial Sequence; identical to SEQ ID NO: 3071
  Description of Artificial Sequence: Synthetic Peanut control sequences; 5' sequence + inner sequence + 3' sequence

SEQ ID NO: 39154 - DNA, 76 bp, Artificial Sequence; identical to SEQ ID NO: 3185
  Description of Artificial Sequence: Synthetic Peanut control sequences; 5' sequence + inner sequence + 3' sequence

SEQ ID NO: 39155 - DNA, 76 bp, Artificial Sequence; identical to SEQ ID NO: 3088
  Description of Artificial Sequence: Synthetic Peanut control sequences; 5' sequence + inner sequence + 3' sequence

SEQ ID NO: 39156 - DNA, 76 bp, Artificial Sequence; identical to SEQ ID NO: 3347
  Description of Artificial Sequence: Synthetic Peanut control sequences; 5' sequence + inner sequence + 3' sequence

SEQ ID NO: 39157 - DNA, 76 bp, Artificial Sequence; identical to SEQ ID NO: 3159
  Description of Artificial Sequence: Synthetic Peanut control sequences; 5' sequence + inner sequence + 3' sequence

SEQ ID NO: 39158 - DNA, 77 bp, Artificial Sequence; identical to SEQ ID NO: 7245
  Description of Artificial Sequence: Synthetic Peanut control sequences; 5' sequence + inner sequence + 3' sequence

SEQ ID NO: 39159 - DNA, 76 bp, Artificial Sequence; identical to SEQ ID NO: 3240
  Description of Artificial Sequence: Synthetic Peanut control sequences; 5' sequence + inner sequence + 3' sequence

SEQ ID NO: 39160 - DNA, 76 bp, Artificial Sequence; identical to SEQ ID NO: 3438
  Description of Artificial Sequence: Synthetic Peanut control sequences; 5' sequence + inner sequence + 3' sequence

SEQ ID NO: 39161 - DNA, 76 bp, Artificial Sequence; identical to SEQ ID NO: 3171
  Description of Artificial Sequence: Synthetic Peanut control sequences; 5' sequence + inner sequence + 3' sequence

SEQ ID NO: 39162 - DNA, 76 bp, Artificial Sequence; identical to SEQ ID NO: 3119
  Description of Artificial Sequence: Synthetic Peanut control sequences; 5' sequence + inner sequence + 3' sequence

SEQ ID NO: 39163 - DNA, 77 bp, Artificial Sequence; identical to SEQ ID NO: 3503
  Description of Artificial Sequence: Synthetic Peanut control sequences; 5' sequence + inner sequence + 3' sequence

SEQ ID NO: 39164 - DNA, 76 bp, Artificial Sequence; identical to SEQ ID NO: 3850
  Description of Artificial Sequence: Synthetic Peanut control sequences; 5' sequence + inner sequence + 3' sequence

SEQ ID NO: 39165 - DNA, 76 bp, Artificial Sequence; identical to SEQ ID NO: 3370
  Description of Artificial Sequence: Synthetic Peanut control sequences; 5' sequence + inner sequence + 3' sequence

SEQ ID NO: 39166 - DNA, 76 bp, Artificial Sequence; identical to SEQ ID NO: 3341
  Description of Artificial Sequence: Synthetic Peanut control sequences; 5' sequence + inner sequence + 3' sequence

SEQ ID NO: 39167 - DNA, 76 bp, Artificial Sequence; identical to SEQ ID NO: 3285
  Description of Artificial Sequence: Synthetic Peanut control sequences; 5' sequence + inner sequence + 3' sequence

SEQ ID NO: 39168 - DNA, 76 bp, Artificial Sequence; identical to SEQ ID NO: 3245
  Description of Artificial Sequence: Synthetic Peanut control sequences; 5' sequence + inner sequence + 3' sequence

SEQ ID NO: 39169 - DNA, 76 bp, Artificial Sequence; identical to SEQ ID NO: 3441
  Description of Artificial Sequence: Synthetic Peanut control sequences; 5' sequence + inner sequence + 3' sequence

SEQ ID NO: 39170 - DNA, 76 bp, Artificial Sequence; identical to SEQ ID NO: 3560
  Description of Artificial Sequence: Synthetic Peanut control sequences; 5' sequence + inner sequence + 3' sequence

SEQ ID NO: 39171 - DNA, 76 bp, Artificial Sequence; identical to SEQ ID NO: 3036
  Description of Artificial Sequence: Synthetic Peanut control sequences; 5' sequence + inner sequence + 3' sequence

SEQ ID NO: 39172 - DNA, 76 bp, Artificial Sequence; identical to SEQ ID NO: 3188
  Description of Artificial Sequence: Synthetic Peanut control sequences; 5' sequence + inner sequence + 3' sequence

SEQ ID NO: 39173 - DNA, 76 bp, Artificial Sequence; identical to SEQ ID NO: 3153
  Description of Artificial Sequence: Synthetic Peanut control sequences; 5' sequence + inner sequence + 3' sequence

SEQ ID NO: 39174 - DNA, 76 bp, Artificial Sequence; identical to SEQ ID NO: 3196
  Description of Artificial Sequence: Synthetic Peanut control sequences; 5' sequence + inner sequence + 3' sequence

SEQ ID NO: 39175 - DNA, 76 bp, Artificial Sequence; identical to SEQ ID NO: 3328
  Description of Artificial Sequence: Synthetic Peanut control sequences; 5' sequence + inner sequence + 3' sequence

SEQ ID NO: 39176 - DNA, 76 bp, Artificial Sequence; identical to SEQ ID NO: 3273
  Description of Artificial Sequence: Synthetic Peanut control sequences; 5' sequence + inner sequence + 3' sequence

SEQ ID NO: 39177 - DNA, 76 bp, Artificial Sequence; identical to SEQ ID NO: 3073
  Description of Artificial Sequence: Synthetic Peanut control sequences; 5' sequence + inner sequence + 3' sequence

SEQ ID NO: 39178 - DNA, 76 bp, Artificial Sequence; identical to SEQ ID NO: 3215
  Description of Artificial Sequence: Synthetic Peanut control sequences; 5' sequence + inner sequence + 3' sequence

SEQ ID NO: 39179 - DNA, 76 bp, Artificial Sequence
  Description of Artificial Sequence: Synthetic Peanut control sequences; 5' sequence + inner sequence + 3' sequence
tagggaagagaaggacatatgattggccgatcatccctcaagttggcgtgtgcttgactagtacatgaccacttga

SEQ ID NO: 39180 - DNA, 76 bp, Artificial Sequence; identical to SEQ ID NO: 3472
  Description of Artificial Sequence: Synthetic Peanut control sequences; 5' sequence + inner sequence + 3' sequence

SEQ ID NO: 39181 - DNA, 76 bp, Artificial Sequence; identical to SEQ ID NO: 3237
  Description of Artificial Sequence: Synthetic Peanut control sequences; 5' sequence + inner sequence + 3' sequence

SEQ ID NO: 39182 - DNA, 76 bp, Artificial Sequence; identical to SEQ ID NO: 3948
  Description of Artificial Sequence: Synthetic Peanut control sequences; 5' sequence + inner sequence + 3' sequence

SEQ ID NO: 39183 - DNA, 76 bp, Artificial Sequence; identical to SEQ ID NO: 3123
  Description of Artificial Sequence: Synthetic Peanut control sequences; 5' sequence + inner sequence + 3' sequence

SEQ ID NO: 39184 - DNA, 76 bp, Artificial Sequence; identical to SEQ ID NO: 7814
  Description of Artificial Sequence: Synthetic Peanut control sequences; 5' sequence + inner sequence + 3' sequence

SEQ ID NO: 39185 - DNA, 76 bp, Artificial Sequence; identical to SEQ ID NO: 3741
  Description of Artificial Sequence: Synthetic Peanut control sequences; 5' sequence + inner sequence + 3' sequence

SEQ ID NO: 39186 - DNA, 76 bp, Artificial Sequence; identical to SEQ ID NO: 11922
  Description of Artificial Sequence: Synthetic Peanut control sequences; 5' sequence + inner sequence + 3' sequence

SEQ ID NO: 39187 - DNA, 76 bp, Artificial Sequence; identical to SEQ ID NO: 3091
  Description of Artificial Sequence: Synthetic Peanut control sequences; 5' sequence + inner sequence + 3' sequence

SEQ ID NO: 39188 - DNA, 76 bp, Artificial Sequence; identical to SEQ ID NO: 3189
  Description of Artificial Sequence: Synthetic Peanut control sequences; 5' sequence + inner sequence + 3' sequence

SEQ ID NO: 39189 - DNA, 76 bp, Artificial Sequence; identical to SEQ ID NO: 3260
  Description of Artificial Sequence: Synthetic Peanut control sequences; 5' sequence + inner sequence + 3' sequence

SEQ ID NO: 39190 - DNA, 76 bp, Artificial Sequence; identical to SEQ ID NO: 3461
  Description of Artificial Sequence: Synthetic Peanut control sequences; 5' sequence + inner sequence + 3' sequence

SEQ ID NO: 39191 - DNA, 76 bp, Artificial Sequence; identical to SEQ ID NO: 3487
  Description of Artificial Sequence: Synthetic Peanut control sequences; 5' sequence + inner sequence + 3' sequence

SEQ ID NO: 39192 - DNA, 77 bp, Artificial Sequence; identical to SEQ ID NO: 23870
  Description of Artificial Sequence: Synthetic Peanut control sequences; 5' sequence + inner sequence + 3' sequence

SEQ ID NO: 39193 - DNA, 76 bp, Artificial Sequence; identical to SEQ ID NO: 3360
  Description of Artificial Sequence: Synthetic Peanut control sequences; 5' sequence + inner sequence + 3' sequence

SEQ ID NO: 39194 - DNA, 76 bp, Artificial Sequence; identical to SEQ ID NO: 3233
  Description of Artificial Sequence: Synthetic Peanut control sequences; 5' sequence + inner sequence + 3' sequence

SEQ ID NO: 39195 - DNA, 76 bp, Artificial Sequence; identical to SEQ ID NO: 3387
  Description of Artificial Sequence: Synthetic Peanut control sequences; 5' sequence + inner sequence + 3' sequence

SEQ ID NO: 39196 - DNA, 76 bp, Artificial Sequence; identical to SEQ ID NO: 3312
  Description of Artificial Sequence: Synthetic Peanut control sequences; 5' sequence + inner sequence + 3' sequence

SEQ ID NO: 39197 - DNA, 76 bp, Artificial Sequence; identical to SEQ ID NO: 3288
  Description of Artificial Sequence: Synthetic Peanut control sequences; 5' sequence + inner sequence + 3' sequence

SEQ ID NO: 39198 - DNA, 76 bp, Artificial Sequence; identical to SEQ ID NO: 3485
  Description of Artificial Sequence: Synthetic Peanut control sequences; 5' sequence + inner sequence + 3' sequence

SEQ ID NO: 39199 - DNA, 76 bp, Artificial Sequence; identical to SEQ ID NO: 3395
  Description of Artificial Sequence: Synthetic Peanut control sequences; 5' sequence + inner sequence + 3' sequence

SEQ ID NO: 39200 - DNA, 76 bp, Artificial Sequence; identical to SEQ ID NO: 3392
  Description of Artificial Sequence: Synthetic Peanut control sequences; 5' sequence + inner sequence + 3' sequence

SEQ ID NO: 39201 - DNA, 76 bp, Artificial Sequence; identical to SEQ ID NO: 3528
  Description of Artificial Sequence: Synthetic Peanut control sequences; 5' sequence + inner sequence + 3' sequence

SEQ ID NO: 39202 - DNA, 76 bp, Artificial Sequence; identical to SEQ ID NO: 3097
  Description of Artificial Sequence: Synthetic Peanut control sequences; 5' sequence + inner sequence + 3' sequence

SEQ ID NO: 39203 - DNA, 76 bp, Artificial Sequence; identical to SEQ ID NO: 3400
  Description of Artificial Sequence: Synthetic Peanut control sequences; 5' sequence + inner sequence + 3' sequence

SEQ ID NO: 39204 - DNA, 76 bp, Artificial Sequence; identical to SEQ ID NO: 3284
  Description of Artificial Sequence: Synthetic Peanut control sequences; 5' sequence + inner sequence + 3' sequence

SEQ ID NO: 39205 - DNA, 76 bp, Artificial Sequence; identical to SEQ ID NO: 3286
  Description of Artificial Sequence: Synthetic Peanut control sequences; 5' sequence + inner sequence + 3' sequence

SEQ ID NO: 39206 - DNA, 76 bp, Artificial Sequence; identical to SEQ ID NO: 3211
  Description of Artificial Sequence: Synthetic Peanut control sequences; 5' sequence + inner sequence + 3' sequence

SEQ ID NO: 39207 - DNA, 76 bp, Artificial Sequence; identical to SEQ ID NO: 3329
  Description of Artificial Sequence: Synthetic Peanut control sequences; 5' sequence + inner sequence + 3' sequence

SEQ ID NO: 39208 - DNA, 77 bp, Artificial Sequence; identical to SEQ ID NO: 3221
  Description of Artificial Sequence: Synthetic Peanut control sequences; 5' sequence + inner sequence + 3' sequence

SEQ ID NO: 39209 - DNA, 76 bp, Artificial Sequence; identical to SEQ ID NO: 3344
  Description of Artificial Sequence: Synthetic Peanut control sequences; 5' sequence + inner sequence + 3' sequence

SEQ ID NO: 39210 - DNA, 76 bp, Artificial Sequence; identical to SEQ ID NO: 3448
  Description of Artificial Sequence: Synthetic Peanut control sequences; 5' sequence + inner sequence + 3' sequence

SEQ ID NO: 39211 - DNA, 76 bp, Artificial Sequence; identical to SEQ ID NO: 3354
  Description of Artificial Sequence: Synthetic Peanut control sequences; 5' sequence + inner sequence + 3' sequence

SEQ ID NO: 39212 - DNA, 76 bp, Artificial Sequence; identical to SEQ ID NO: 3582
  Description of Artificial Sequence: Synthetic Peanut control sequences; 5' sequence + inner sequence + 3' sequence

SEQ ID NO: 39213 - DNA, 76 bp, Artificial Sequence; identical to SEQ ID NO: 3305
  Description of Artificial Sequence: Synthetic Peanut control sequences; 5' sequence + inner sequence + 3' sequence

SEQ ID NO: 39214 - DNA, 76 bp, Artificial Sequence; identical to SEQ ID NO: 3266
  Description of Artificial Sequence: Synthetic Peanut control sequences; 5' sequence + inner sequence + 3' sequence

SEQ ID NO: 39215 - DNA, 76 bp, Artificial Sequence; identical to SEQ ID NO: 3783
  Description of Artificial Sequence: Synthetic Peanut control sequences; 5' sequence + inner sequence + 3' sequence

SEQ ID NO: 39216 - DNA, 76 bp, Artificial Sequence; identical to SEQ ID NO: 3139
  Description of Artificial Sequence: Synthetic Peanut control sequences; 5' sequence + inner sequence + 3' sequence

SEQ ID NO: 39217 - DNA, 76 bp, Artificial Sequence; identical to SEQ ID NO: 3373
  Description of Artificial Sequence: Synthetic Peanut control sequences; 5' sequence + inner sequence + 3' sequence

SEQ ID NO: 39218 - DNA, 76 bp, Artificial Sequence; identical to SEQ ID NO: 3340
  Description of Artificial Sequence: Synthetic Peanut control sequences; 5' sequence + inner sequence + 3' sequence

SEQ ID NO: 39219 - DNA, 76 bp, Artificial Sequence; identical to SEQ ID NO: 3437
  Description of Artificial Sequence: Synthetic Peanut control sequences; 5' sequence + inner sequence + 3' sequence

SEQ ID NO: 39220 - DNA, 76 bp, Artificial Sequence; identical to SEQ ID NO: 3166
  Description of Artificial Sequence: Synthetic Peanut control sequences; 5' sequence + inner sequence + 3' sequence

SEQ ID NO: 39221 - DNA, 76 bp, Artificial Sequence; identical to SEQ ID NO: 7552
  Description of Artificial Sequence: Synthetic Peanut control sequences; 5' sequence + inner sequence + 3' sequence

SEQ ID NO: 39222 - DNA, 76 bp, Artificial Sequence; identical to SEQ ID NO: 3355
  Description of Artificial Sequence: Synthetic Peanut control sequences; 5' sequence + inner sequence + 3' sequence

SEQ ID NO: 39223 - DNA, 76 bp, Artificial Sequence; identical to SEQ ID NO: 3517
  Description of Artificial Sequence: Synthetic Peanut control sequences; 5' sequence + inner sequence + 3' sequence

SEQ ID NO: 39224 - DNA, 76 bp, Artificial Sequence; identical to SEQ ID NO: 3374
  Description of Artificial Sequence: Synthetic Peanut control sequences; 5' sequence + inner sequence + 3' sequence

SEQ ID NO: 39225 - DNA, 76 bp, Artificial Sequence; identical to SEQ ID NO: 3132
  Description of Artificial Sequence: Synthetic Peanut control sequences; 5' sequence + inner sequence + 3' sequence

SEQ ID NO: 39226 - DNA, 76 bp, Artificial Sequence; identical to SEQ ID NO: 3283
  Description of Artificial Sequence: Synthetic Peanut control sequences; 5' sequence + inner sequence + 3' sequence

SEQ ID NO: 39227 - DNA, 76 bp, Artificial Sequence; identical to SEQ ID NO: 3715
  Description of Artificial Sequence: Synthetic Peanut control sequences; 5' sequence + inner sequence + 3' sequence

SEQ ID NO: 39228 - DNA, 76 bp, Artificial Sequence; identical to SEQ ID NO: 3287
  Description of Artificial Sequence: Synthetic Peanut control sequences; 5' sequence + inner sequence + 3' sequence

SEQ ID NO: 39229 - DNA, 76 bp, Artificial Sequence; identical to SEQ ID NO: 3470
  Description of Artificial Sequence: Synthetic Peanut control sequences; 5' sequence + inner sequence + 3' sequence

SEQ ID NO: 39230 - DNA, 76 bp, Artificial Sequence; identical to SEQ ID NO: 3916
  Description of Artificial Sequence: Synthetic Peanut control sequences; 5' sequence + inner sequence + 3' sequence

SEQ ID NO: 39231 - DNA, 76 bp, Artificial Sequence; identical to SEQ ID NO: 3524
  Description of Artificial Sequence: Synthetic Peanut control sequences; 5' sequence + inner sequence + 3' sequence

SEQ ID NO: 39232 - DNA, 76 bp, Artificial Sequence; identical to SEQ ID NO: 3346
  Description of Artificial Sequence: Synthetic Peanut control sequences; 5' sequence + inner sequence + 3' sequence

SEQ ID NO: 39233 - DNA, 76 bp, Artificial Sequence; identical to SEQ ID NO: 7254
  Description of Artificial Sequence: Synthetic Peanut control sequences; 5' sequence + inner sequence + 3' sequence

SEQ ID NO: 39234 - DNA, 76 bp, Artificial Sequence; identical to SEQ ID NO: 3151
  Description of Artificial Sequence: Synthetic Peanut control sequences; 5' sequence + inner sequence + 3' sequence

SEQ ID NO: 39235 - DNA, 76 bp, Artificial Sequence; identical to SEQ ID NO: 3695
  Description of Artificial Sequence: Synthetic Peanut control sequences; 5' sequence + inner sequence + 3' sequence

SEQ ID NO: 39236 - DNA, 76 bp, Artificial Sequence; identical to SEQ ID NO: 11682
  Description of Artificial Sequence: Synthetic Peanut control sequences; 5' sequence + inner sequence + 3' sequence

SEQ ID NO: 39237 - DNA, 76 bp, Artificial Sequence; identical to SEQ ID NO: 3179
  Description of Artificial Sequence: Synthetic Peanut control sequences; 5' sequence + inner sequence + 3' sequence

SEQ ID NO: 39238 - DNA, 77 bp, Artificial Sequence; identical to SEQ ID NO: 3258
  Description of Artificial Sequence: Synthetic Peanut control sequences; 5' sequence + inner sequence + 3' sequence

SEQ ID NO: 39239 - DNA, 76 bp, Artificial Sequence; identical to SEQ ID NO: 3401
  Description of Artificial Sequence: Synthetic Peanut control sequences; 5' sequence + inner sequence + 3' sequence

SEQ ID NO: 39240 - DNA, 76 bp, Artificial Sequence; identical to SEQ ID NO: 7234
  Description of Artificial Sequence: Synthetic Peanut control sequences; 5' sequence + inner sequence + 3' sequence

SEQ ID NO: 39241 - DNA, 76 bp, Artificial Sequence; identical to SEQ ID NO: 7229
  Description of Artificial Sequence: Synthetic Peanut control sequences; 5' sequence + inner sequence + 3' sequence

SEQ ID NO: 39242 - DNA, 76 bp, Artificial Sequence; identical to SEQ ID NO: 3174
  Description of Artificial Sequence: Synthetic Peanut control sequences; 5' sequence + inner sequence + 3' sequence

SEQ ID NO: 39243 - DNA, 76 bp, Artificial Sequence; identical to SEQ ID NO: 3801
  Description of Artificial Sequence: Synthetic Peanut control sequences; 5' sequence + inner sequence + 3' sequence

SEQ ID NO: 39244 - DNA, 76 bp, Artificial Sequence; identical to SEQ ID NO: 3105
  Description of Artificial Sequence: Synthetic Peanut control sequences; 5' sequence + inner sequence + 3' sequence

SEQ ID NO: 39245 - DNA, 76 bp, Artificial Sequence; identical to SEQ ID NO: 3144
  Description of Artificial Sequence: Synthetic Peanut control sequences; 5' sequence + inner sequence + 3' sequence

SEQ ID NO: 39246 - DNA, 76 bp, Artificial Sequence; identical to SEQ ID NO: 3369
  Description of Artificial Sequence: Synthetic Peanut control sequences; 5' sequence + inner sequence + 3' sequence

SEQ ID NO: 39247 - DNA, 76 bp, Artificial Sequence; identical to SEQ ID NO: 3834
  Description of Artificial Sequence: Synthetic Peanut control sequences; 5' sequence + inner sequence + 3' sequence

SEQ ID NO: 39248 - DNA, 76 bp, Artificial Sequence; identical to SEQ ID NO: 3406
  Description of Artificial Sequence: Synthetic Peanut control sequences; 5' sequence + inner sequence + 3' sequence

SEQ ID NO: 39249 - DNA, 76 bp, Artificial Sequence; identical to SEQ ID NO: 31268
  Description of Artificial Sequence: Synthetic Peanut control sequences; 5' sequence + inner sequence + 3' sequence

SEQ ID NO: 39250 - DNA, 76 bp, Artificial Sequence; identical to SEQ ID NO: 3985
  Description of Artificial Sequence: Synthetic Peanut control sequences; 5' sequence + inner sequence + 3' sequence

SEQ ID NO: 39251 - DNA, 76 bp, Artificial Sequence; identical to SEQ ID NO: 3184
  Description of Artificial Sequence: Synthetic Peanut control sequences; 5' sequence + inner sequence + 3' sequence

SEQ ID NO: 39252 - DNA, 76 bp, Artificial Sequence; identical to SEQ ID NO: 3112
  Description of Artificial Sequence: Synthetic Peanut control sequences; 5' sequence + inner sequence + 3' sequence

SEQ ID NO: 39253 - DNA, 75 bp, Artificial Sequence; identical to SEQ ID NO: 7559
  Description of Artificial Sequence: Synthetic Peanut control sequences; 5' sequence + inner sequence + 3' sequence

SEQ ID NO: 39254 - DNA, 76 bp, Artificial Sequence; identical to SEQ ID NO: 3764
  Description of Artificial Sequence: Synthetic Peanut control sequences; 5' sequence + inner sequence + 3' sequence

SEQ ID NO: 39255 - DNA, 76 bp, Artificial Sequence; identical to SEQ ID NO: 3238
  Description of Artificial Sequence: Synthetic Peanut control sequences; 5' sequence + inner sequence + 3' sequence

SEQ ID NO: 39256 - DNA, 76 bp, Artificial Sequence; identical to SEQ ID NO: 3127
  Description of Artificial Sequence: Synthetic Peanut control sequences; 5' sequence + inner sequence + 3' sequence

SEQ ID NO: 39257 - DNA, 76 bp, Artificial Sequence; identical to SEQ ID NO: 7889
  Description of Artificial Sequence: Synthetic Peanut control sequences; 5' sequence + inner sequence + 3' sequence

SEQ ID NO: 39258 - DNA, 73 bp, Artificial Sequence; identical to SEQ ID NO: 3885
  Description of Artificial Sequence: Synthetic Peanut control sequences; 5' sequence + inner sequence + 3' sequence

SEQ ID NO: 39259 - DNA, 76 bp, Artificial Sequence; identical to SEQ ID NO: 3563
  Description of Artificial Sequence: Synthetic Peanut control sequences; 5' sequence + inner sequence + 3' sequence

SEQ ID NO: 39260 - DNA, 76 bp, Artificial Sequence; identical to SEQ ID NO: 3454
  Description of Artificial Sequence: Synthetic Peanut control sequences; 5' sequence + inner sequence + 3' sequence

SEQ ID NO: 39261 - DNA, 76 bp, Artificial Sequence; identical to SEQ ID NO: 3548
  Description of Artificial Sequence: Synthetic Peanut control sequences; 5' sequence + inner sequence + 3' sequence

SEQ ID NO: 39262 - DNA, 76 bp, Artificial Sequence; identical to SEQ ID NO: 3409
  Description of Artificial Sequence: Synthetic Peanut control sequences; 5' sequence + inner sequence + 3' sequence

SEQ ID NO: 39263 - DNA, 76 bp, Artificial Sequence; identical to SEQ ID NO: 3464
  Description of Artificial Sequence: Synthetic Peanut control sequences; 5' sequence + inner sequence + 3' sequence

SEQ ID NO: 39264 - DNA, 76 bp, Artificial Sequence; identical to SEQ ID NO: 3212
  Description of Artificial Sequence: Synthetic Peanut control sequences; 5' sequence + inner sequence + 3' sequence

SEQ ID NO: 39265 - DNA, 75 bp, Artificial Sequence; identical to SEQ ID NO: 3648
  Description of Artificial Sequence: Synthetic Peanut control sequences; 5' sequence + inner sequence + 3' sequence

SEQ ID NO: 39266 - DNA, 76 bp, Artificial Sequence; identical to SEQ ID NO: 3318
  Description of Artificial Sequence: Synthetic Peanut control sequences; 5' sequence + inner sequence + 3' sequence

SEQ ID NO: 39267 - DNA, 76 bp, Artificial Sequence; identical to SEQ ID NO: 3187
  Description of Artificial Sequence: Synthetic Peanut control sequences; 5' sequence + inner sequence + 3' sequence

SEQ ID NO: 39268 - DNA, 76 bp, Artificial Sequence; identical to SEQ ID NO: 3135
  Description of Artificial Sequence: Synthetic Peanut control sequences; 5' sequence + inner sequence + 3' sequence

SEQ ID NO: 39269 - DNA, 76 bp, Artificial Sequence; identical to SEQ ID NO: 3968
  Description of Artificial Sequence: Synthetic Peanut control sequences; 5' sequence + inner sequence + 3' sequence

SEQ ID NO: 39270 - DNA, 76 bp, Artificial Sequence; identical to SEQ ID NO: 11825
  Description of Artificial Sequence: Synthetic Peanut control sequences; 5' sequence + inner sequence + 3' sequence

SEQ ID NO: 39271 - DNA, 76 bp, Artificial Sequence; identical to SEQ ID NO: 3698
  Description of Artificial Sequence: Synthetic Peanut control sequences; 5' sequence + inner sequence + 3' sequence

SEQ ID NO: 39272 - DNA, 76 bp, Artificial Sequence; identical to SEQ ID NO: 3121
  Description of Artificial Sequence: Synthetic Peanut control sequences; 5' sequence + inner sequence + 3' sequence

SEQ ID NO: 39273 - DNA, 76 bp, Artificial Sequence; identical to SEQ ID NO: 3130
  Description of Artificial Sequence: Synthetic Peanut control sequences; 5' sequence + inner sequence + 3' sequence

SEQ ID NO: 39274 - DNA, 76 bp, Artificial Sequence; identical to SEQ ID NO: 3165
  Description of Artificial Sequence: Synthetic Peanut control sequences; 5' sequence + inner sequence + 3' sequence

SEQ ID NO: 39275 - DNA, 77 bp, Artificial Sequence; identical to SEQ ID NO: 3216
  Description of Artificial Sequence: Synthetic Peanut control sequences; 5' sequence + inner sequence + 3' sequence

SEQ ID NO: 39276 - DNA, 76 bp, Artificial Sequence; identical to SEQ ID NO: 7981
  Description of Artificial Sequence: Synthetic Peanut control sequences; 5' sequence + inner sequence + 3' sequence

SEQ ID NO: 39277 - DNA, 79 bp, Artificial Sequence; identical to SEQ ID NO: 3864
  Description of Artificial Sequence: Synthetic Peanut control sequences; 5' sequence + inner sequence + 3' sequence

SEQ ID NO: 39278 - DNA, 76 bp, Artificial Sequence; identical to SEQ ID NO: 3740
  Description of Artificial Sequence: Synthetic Peanut control sequences; 5' sequence + inner sequence + 3' sequence

SEQ ID NO: 39279 - DNA, 76 bp, Artificial Sequence; identical to SEQ ID NO: 3149
  Description of Artificial Sequence: Synthetic Peanut control sequences; 5' sequence + inner sequence + 3' sequence

SEQ ID NO: 39280 - DNA, 76 bp, Artificial Sequence; identical to SEQ ID NO: 3120
  Description of Artificial Sequence: Synthetic Peanut control sequences; 5' sequence + inner sequence + 3' sequence

SEQ ID NO: 39281 - DNA, 76 bp, Artificial Sequence; identical to SEQ ID NO: 3282
  Description of Artificial Sequence: Synthetic Peanut control sequences; 5' sequence + inner sequence + 3' sequence

SEQ ID NO: 39282 - DNA, 76 bp, Artificial Sequence; identical to SEQ ID NO: 3079
  Description of Artificial Sequence: Synthetic Peanut control sequences; 5' sequence + inner sequence + 3' sequence

SEQ ID NO: 39283 - DNA, 76 bp, Artificial Sequence; identical to SEQ ID NO: 3103
  Description of Artificial Sequence: Synthetic Peanut control sequences; 5' sequence + inner sequence + 3' sequence

SEQ ID NO: 39284 - DNA, 76 bp, Artificial Sequence; identical to SEQ ID NO: 7205
  Description of Artificial Sequence: Synthetic Peanut control sequences; 5' sequence + inner sequence + 3' sequence

SEQ ID NO: 39285 - DNA, 76 bp, Artificial Sequence; identical to SEQ ID NO: 3950
  Description of Artificial Sequence: Synthetic Peanut control sequences; 5' sequence + inner sequence + 3' sequence

SEQ ID NO: 39286 - DNA, 71 bp, Artificial Sequence; identical to SEQ ID NO: 23136
  Description of Artificial Sequence: Synthetic Peanut control sequences; 5' sequence + inner sequence + 3' sequence

SEQ ID NO: 39287 - DNA, 76 bp, Artificial Sequence; identical to SEQ ID NO: 3294
  Description of Artificial Sequence: Synthetic Peanut control sequences; 5' sequence + inner sequence + 3' sequence

SEQ ID NO: 39288 - DNA, 76 bp, Artificial Sequence; identical to SEQ ID NO: 3327
  Description of Artificial Sequence: Synthetic Peanut control sequences; 5' sequence + inner sequence + 3' sequence

SEQ ID NO: 39289 - DNA, 76 bp, Artificial Sequence; identical to SEQ ID NO: 3630
  Description of Artificial Sequence: Synthetic Peanut control sequences; 5' sequence + inner sequence + 3' sequence

SEQ ID NO: 39290 - DNA, 76 bp, Artificial Sequence; identical to SEQ ID NO: 3352
  Description of Artificial Sequence: Synthetic Peanut control sequences; 5' sequence + inner sequence + 3' sequence

SEQ ID NO: 39291 - DNA, 76 bp, Artificial Sequence; identical to SEQ ID NO: 3673
  Description of Artificial Sequence: Synthetic Peanut control sequences; 5' sequence + inner sequence + 3' sequence

SEQ ID NO: 39292 - DNA, 76 bp, Artificial Sequence; identical to SEQ ID NO: 3298
  Description of Artificial Sequence: Synthetic Peanut control sequences; 5' sequence + inner sequence + 3' sequence

SEQ ID NO: 39293 - DNA, 76 bp, Artificial Sequence; identical to SEQ ID NO: 7881
  Description of Artificial Sequence: Synthetic Peanut control sequences; 5' sequence + inner sequence + 3' sequence

SEQ ID NO: 39294 - DNA, 76 bp, Artificial Sequence; identical to SEQ ID NO: 3928
  Description of Artificial Sequence: Synthetic Peanut control sequences; 5' sequence + inner sequence + 3' sequence

SEQ ID NO: 39295 - DNA, 76 bp, Artificial Sequence; identical to SEQ ID NO: 3640
  Description of Artificial Sequence: Synthetic Peanut control sequences; 5' sequence + inner sequence + 3' sequence

SEQ ID NO: 39296 - DNA, 76 bp, Artificial Sequence; identical to SEQ ID NO: 3914
  Description of Artificial Sequence: Synthetic Peanut control sequences; 5' sequence + inner sequence + 3' sequence

SEQ ID NO: 39297 - DNA, 76 bp, Artificial Sequence; identical to SEQ ID NO: 31926
  Description of Artificial Sequence: Synthetic Peanut control sequences; 5' sequence + inner sequence + 3' sequence

SEQ ID NO: 39298 - DNA, 76 bp, Artificial Sequence; identical to SEQ ID NO: 31472
  Description of Artificial Sequence: Synthetic Peanut control sequences; 5' sequence + inner sequence + 3' sequence

SEQ ID NO: 39299 - DNA, 76 bp, Artificial Sequence; identical to SEQ ID NO: 3379
  Description of Artificial Sequence: Synthetic Peanut control sequences; 5' sequence + inner sequence + 3' sequence

SEQ ID NO: 39300 - DNA, 76 bp, Artificial Sequence; identical to SEQ ID NO: 3301
  Description of Artificial Sequence: Synthetic Peanut control sequences; 5' sequence + inner sequence + 3' sequence

SEQ ID NO: 39301 - DNA, 76 bp, Artificial Sequence; identical to SEQ ID NO: 3107
  Description of Artificial Sequence: Synthetic Peanut control sequences; 5' sequence + inner sequence + 3' sequence

SEQ ID NO: 39302 - DNA, 76 bp, Artificial Sequence; identical to SEQ ID NO: 3511
  Description of Artificial Sequence: Synthetic Peanut control sequences; 5' sequence + inner sequence + 3' sequence

SEQ ID NO: 39303 - DNA, 76 bp, Artificial Sequence; identical to SEQ ID NO: 3572
  Description of Artificial Sequence: Synthetic Peanut control sequences; 5' sequence + inner sequence + 3' sequence

SEQ ID NO: 39304 - DNA, 76 bp, Artificial Sequence; identical to SEQ ID NO: 3645
  Description of Artificial Sequence: Synthetic Peanut control sequences; 5' sequence + inner sequence + 3' sequence

SEQ ID NO: 39305 - DNA, 76 bp, Artificial Sequence; identical to SEQ ID NO: 3615
  Description of Artificial Sequence: Synthetic Peanut control sequences; 5' sequence + inner sequence + 3' sequence

SEQ ID NO: 39306 - DNA, 76 bp, Artificial Sequence; identical to SEQ ID NO: 3545
  Description of Artificial Sequence: Synthetic Peanut control sequences; 5' sequence + inner sequence + 3' sequence

SEQ ID NO: 39307 - DNA, 76 bp, Artificial Sequence; identical to SEQ ID NO: 3192
  Description of Artificial Sequence: Synthetic Peanut control sequences; 5' sequence + inner sequence + 3' sequence

SEQ ID NO: 39308 - DNA, 76 bp, Artificial Sequence; identical to SEQ ID NO: 15931
  Description of Artificial Sequence: Synthetic Peanut control sequences; 5' sequence + inner sequence + 3' sequence

SEQ ID NO: 39309 - DNA, 76 bp, Artificial Sequence; identical to SEQ ID NO: 3686
  Description of Artificial Sequence: Synthetic Peanut control sequences; 5' sequence + inner sequence + 3' sequence

SEQ ID NO: 39310 - DNA, 76 bp, Artificial Sequence; identical to SEQ ID NO: 3585
  Description of Artificial Sequence: Synthetic Peanut control sequences; 5' sequence + inner sequence + 3' sequence

SEQ ID NO: 39311 - DNA, 76 bp, Artificial Sequence; identical to SEQ ID NO: 7598
  Description of Artificial Sequence: Synthetic Peanut control sequences; 5' sequence + inner sequence + 3' sequence

SEQ ID NO: 39312 - DNA, 75 bp, Artificial Sequence
  Description of Artificial Sequence: Synthetic Peanut control sequences; 5' sequence + inner sequence + 3' sequence
tagggaagagaaggacatatgattggccgatcgaccctatcatgaggccatgttgactagtacatgaccacttga

SEQ ID NO: 39313 - DNA, 76 bp, Artificial Sequence; identical to SEQ ID NO: 3532
  Description of Artificial Sequence: Synthetic Peanut control sequences; 5' sequence + inner sequence + 3' sequence

SEQ ID NO: 39314 - DNA, 75 bp, Artificial Sequence; identical to SEQ ID NO: 3453
  Description of Artificial Sequence: Synthetic Peanut control sequences; 5' sequence + inner sequence + 3' sequence

SEQ ID NO: 39315 - DNA, 76 bp, Artificial Sequence; identical to SEQ ID NO: 15939
  Description of Artificial Sequence: Synthetic Peanut control sequences; 5' sequence + inner sequence + 3' sequence

SEQ ID NO: 39316 - DNA, 76 bp, Artificial Sequence; identical to SEQ ID NO: 3553
  Description of Artificial Sequence: Synthetic Peanut control sequences; 5' sequence + inner sequence + 3' sequence

SEQ ID NO: 39317 - DNA, 76 bp, Artificial Sequence; identical to SEQ ID NO: 3522
  Description of Artificial Sequence: Synthetic Peanut control sequences; 5' sequence + inner sequence + 3' sequence

SEQ ID NO: 39318 - DNA, 76 bp, Artificial Sequence; identical to SEQ ID NO: 3320
  Description of Artificial Sequence: Synthetic Peanut control sequences; 5' sequence + inner sequence + 3' sequence

SEQ ID NO: 39319 - DNA, 76 bp, Artificial Sequence; identical to SEQ ID NO: 3232
  Description of Artificial Sequence: Synthetic Peanut control sequences; 5' sequence + inner sequence + 3' sequence

SEQ ID NO: 39320 - DNA, 76 bp, Artificial Sequence; identical to SEQ ID NO: 3386
  Description of Artificial Sequence: Synthetic Peanut control sequences; 5' sequence + inner sequence + 3' sequence

SEQ ID NO: 39321 - DNA, 76 bp, Artificial Sequence; identical to SEQ ID NO: 3586
  Description of Artificial Sequence: Synthetic Peanut control sequences; 5' sequence + inner sequence + 3' sequence

SEQ ID NO: 39322 - DNA, 76 bp, Artificial Sequence; identical to SEQ ID NO: 3194
  Description of Artificial Sequence: Synthetic Peanut control sequences; 5' sequence + inner sequence + 3' sequence

SEQ ID NO: 39323 - DNA, 76 bp, Artificial Sequence; identical to SEQ ID NO: 3321
  Description of Artificial Sequence: Synthetic Peanut control sequences; 5' sequence + inner sequence + 3' sequence

SEQ ID NO: 39324 - DNA, 76 bp, Artificial Sequence
  Description of Artificial Sequence: Synthetic Peanut control sequences; 5' sequence + inner sequence + 3' sequence
tagggaagagaaggacatatgatgcatcagggcgttcgatggctagctggtcattgactagtacatgaccacttga

SEQ ID NO: 39325 - DNA, 76 bp, Artificial Sequence; identical to SEQ ID NO: 3816
  Description of Artificial Sequence: Synthetic Peanut control sequences; 5' sequence + inner sequence + 3' sequence

SEQ ID NO: 39326 - DNA, 76 bp, Artificial Sequence; identical to SEQ ID NO: 3226
  Description of Artificial Sequence: Synthetic Peanut control sequences; 5' sequence + inner sequence + 3' sequence

SEQ ID NO: 39327 - DNA, 76 bp, Artificial Sequence; identical to SEQ ID NO: 3390
  Description of Artificial Sequence: Synthetic Peanut control sequences; 5' sequence + inner sequence + 3' sequence

SEQ ID NO: 39328 - DNA, 76 bp, Artificial Sequence; identical to SEQ ID NO: 3083
  Description of Artificial Sequence: Synthetic Peanut control sequences; 5' sequence + inner sequence + 3' sequence

SEQ ID NO: 39329 - DNA, 71 bp, Artificial Sequence; identical to SEQ ID NO: 23741
  Description of Artificial Sequence: Synthetic Peanut control sequences; 5' sequence + inner sequence + 3' sequence

SEQ ID NO: 39330 - DNA, 76 bp, Artificial Sequence; identical to SEQ ID NO: 3951
  Description of Artificial Sequence: Synthetic Peanut control sequences; 5' sequence + inner sequence + 3' sequence

SEQ ID NO: 39331 - DNA, 76 bp, Artificial Sequence; identical to SEQ ID NO: 3457
  Description of Artificial Sequence: Synthetic Peanut control sequences; 5' sequence + inner sequence + 3' sequence

SEQ ID NO: 39332 - DNA, 76 bp, Artificial Sequence; identical to SEQ ID NO: 3793
  Description of Artificial Sequence: Synthetic Peanut control sequences; 5' sequence + inner sequence + 3' sequence

SEQ ID NO: 39333 - DNA, 76 bp, Artificial Sequence
  Description of Artificial Sequence: Synthetic Peanut control sequences; 5' sequence + inner sequence + 3' sequence
tagggaagagaaggacatatgatgtgcttccacttcccagcaagtgcgtcacgttgactagtacatgaccacttga

SEQ ID NO: 39334 - DNA, 76 bp, Artificial Sequence; identical to SEQ ID NO: 3780
  Description of Artificial Sequence: Synthetic Peanut control sequences; 5' sequence + inner sequence + 3' sequence

SEQ ID NO: 39335 - DNA, 76 bp, Artificial Sequence; identical to SEQ ID NO: 7301
  Description of Artificial Sequence: Synthetic Peanut control sequences; 5' sequence + inner sequence + 3' sequence

SEQ ID NO: 39336 - DNA, 76 bp, Artificial Sequence; identical to SEQ ID NO: 3316
  Description of Artificial Sequence: Synthetic Peanut control sequences; 5' sequence + inner sequence + 3' sequence

SEQ ID NO: 39337 - DNA, 76 bp, Artificial Sequence; identical to SEQ ID NO: 3348
  Description of Artificial Sequence: Synthetic Peanut control sequences; 5' sequence + inner sequence + 3' sequence

SEQ ID NO: 39338 - DNA, 76 bp, Artificial Sequence; identical to SEQ ID NO: 3204
  Description of Artificial Sequence: Synthetic Peanut control sequences; 5' sequence + inner sequence + 3' sequence

SEQ ID NO: 39339 - DNA, 76 bp, Artificial Sequence; identical to SEQ ID NO: 3272
  Description of Artificial Sequence: Synthetic Peanut control sequences; 5' sequence + inner sequence + 3' sequence

SEQ ID NO: 39340 - DNA, 76 bp, Artificial Sequence
  Description of Artificial Sequence: Synthetic Peanut control sequences; 5' sequence + inner sequence + 3' sequence
tagggaagagaaggacatatgatcgtatgtcgtcacgacccttcgagtggacattgactagtacatgaccacttga

SEQ ID NO: 39341 - DNA, 76 bp, Artificial Sequence; identical to SEQ ID NO: 3476
  Description of Artificial Sequence: Synthetic Peanut control sequences; 5' sequence + inner sequence + 3' sequence

SEQ ID NO: 39342 - DNA, 76 bp, Artificial Sequence; identical to SEQ ID NO: 3064
  Description of Artificial Sequence: Synthetic Peanut control sequences; 5' sequence + inner sequence + 3' sequence

SEQ ID NO: 39343 - DNA, 76 bp, Artificial Sequence; identical to SEQ ID NO: 3541
  Description of Artificial Sequence: Synthetic Peanut control sequences; 5' sequence + inner sequence + 3' sequence

SEQ ID NO: 39344 - DNA, 76 bp, Artificial Sequence; identical to SEQ ID NO: 3205
  Description of Artificial Sequence: Synthetic Peanut control sequences; 5' sequence + inner sequence + 3' sequence

SEQ ID NO: 39345 - DNA, 76 bp, Artificial Sequence; identical to SEQ ID NO: 3264
  Description of Artificial Sequence: Synthetic Peanut control sequences; 5' sequence + inner sequence + 3' sequence

SEQ ID NO: 39346 - DNA, 76 bp, Artificial Sequence; identical to SEQ ID NO: 3901
  Description of Artificial Sequence: Synthetic Peanut control sequences; 5' sequence + inner sequence + 3' sequence

SEQ ID NO: 39347 - DNA, 76 bp, Artificial Sequence
  Description of Artificial Sequence: Synthetic Peanut control sequences; 5' sequence + inner sequence + 3' sequence
tagggaagagaaggacatatgatgaccgaaacggaccgaagtgcgtgatgtgcttgactagtacatgaccacttga

SEQ ID NO: 39348 - DNA, 76 bp, Artificial Sequence; identical to SEQ ID NO: 11950
  Description of Artificial Sequence: Synthetic Peanut control sequences; 5' sequence + inner sequence + 3' sequence

SEQ ID NO: 39349 - DNA, 76 bp, Artificial Sequence; identical to SEQ ID NO: 3239
  Description of Artificial Sequence: Synthetic Peanut control sequences; 5' sequence + inner sequence + 3' sequence

SEQ ID NO: 39350 - DNA, 76 bp, Artificial Sequence; identical to SEQ ID NO: 7874
  Description of Artificial Sequence: Synthetic Peanut control sequences; 5' sequence + inner sequence + 3' sequence

SEQ ID NO: 39351 - DNA, 76 bp, Artificial Sequence; identical to SEQ ID NO: 3343
  Description of Artificial Sequence: Synthetic Peanut control sequences; 5' sequence + inner sequence + 3' sequence

SEQ ID NO: 39352 - DNA, 75 bp, Artificial Sequence; identical to SEQ ID NO: 7763
  Description of Artificial Sequence: Synthetic Peanut control sequences; 5' sequence + inner sequence + 3' sequence

SEQ ID NO: 39353 - DNA, 75 bp, Artificial Sequence
  Description of Artificial Sequence: Synthetic Peanut control sequences; 5' sequence + inner sequence + 3' sequence
tagggaagagaaggacatatgatggccaagcgacctagcaagtgtgctcatgttgactagtacatgaccacttga

SEQ ID NO: 39354 - DNA, 76 bp, Artificial Sequence; identical to SEQ ID NO: 3692
  Description of Artificial Sequence: Synthetic Peanut control sequences; 5' sequence + inner sequence + 3' sequence

SEQ ID NO: 39355 - DNA, 76 bp, Artificial Sequence; identical to SEQ ID NO: 3800
  Description of Artificial Sequence: Synthetic Peanut control sequences; 5' sequence + inner sequence + 3' sequence

SEQ ID NO: 39356 - DNA, 76 bp, Artificial Sequence; identical to SEQ ID NO: 3596
  Description of Artificial Sequence: Synthetic Peanut control sequences; 5' sequence + inner sequence + 3' sequence

SEQ ID NO: 39357 - DNA, 76 bp, Artificial Sequence; identical to SEQ ID NO: 3611
  Description of Artificial Sequence: Synthetic Peanut control sequences; 5' sequence + inner sequence + 3' sequence

SEQ ID NO: 39358 - DNA, 76 bp, Artificial Sequence; identical to SEQ ID NO: 7407
  Description of Artificial Sequence: Synthetic Peanut control sequences; 5' sequence + inner sequence + 3' sequence

SEQ ID NO: 39359 - DNA, 76 bp, Artificial Sequence; identical to SEQ ID NO: 3336
  Description of Artificial Sequence: Synthetic Peanut control sequences; 5' sequence + inner sequence + 3' sequence

SEQ ID NO: 39360 - DNA, 76 bp, Artificial Sequence; identical to SEQ ID NO: 7543
  Description of Artificial Sequence: Synthetic Peanut control sequences; 5' sequence + inner sequence + 3' sequence

SEQ ID NO: 39361 - DNA, 76 bp, Artificial Sequence; identical to SEQ ID NO: 3446
  Description of Artificial Sequence: Synthetic Peanut control sequences; 5' sequence + inner sequence + 3' sequence

SEQ ID NO: 39362 - DNA, 76 bp, Artificial Sequence; identical to SEQ ID NO: 7864
  Description of Artificial Sequence: Synthetic Peanut control sequences; 5' sequence + inner sequence + 3' sequence

SEQ ID NO: 39363 - DNA, 76 bp, Artificial Sequence; identical to SEQ ID NO: 3303
  Description of Artificial Sequence: Synthetic Peanut control sequences; 5' sequence + inner sequence + 3' sequence

SEQ ID NO: 39364 - DNA, 76 bp, Artificial Sequence; identical to SEQ ID NO: 7394
  Description of Artificial Sequence: Synthetic Peanut control sequences; 5' sequence + inner sequence + 3' sequence

SEQ ID NO: 39365 - DNA, 76 bp, Artificial Sequence; identical to SEQ ID NO: 31922
  Description of Artificial Sequence: Synthetic Peanut control sequences; 5' sequence + inner sequence + 3' sequence

SEQ ID NO: 39366 - DNA, 76 bp, Artificial Sequence; identical to SEQ ID NO: 3376
  Description of Artificial Sequence: Synthetic Peanut control sequences; 5' sequence + inner sequence + 3' sequence

SEQ ID NO: 39367 - DNA, 76 bp, Artificial Sequence; identical to SEQ ID NO: 3636
  Description of Artificial Sequence: Synthetic Peanut control sequences; 5' sequence + inner sequence + 3' sequence

SEQ ID NO: 39368 - DNA, 76 bp, Artificial Sequence; identical to SEQ ID NO: 3254
  Description of Artificial Sequence: Synthetic Peanut control sequences; 5' sequence + inner sequence + 3' sequence

SEQ ID NO: 39369 - DNA, 76 bp, Artificial Sequence; identical to SEQ ID NO: 3413
  Description of Artificial Sequence: Synthetic Peanut control sequences; 5' sequence + inner sequence + 3' sequence

SEQ ID NO: 39370 - DNA, 76 bp, Artificial Sequence; identical to SEQ ID NO: 7650
  Description of Artificial Sequence: Synthetic Peanut control sequences; 5' sequence + inner sequence + 3' sequence

SEQ ID NO: 39371 - DNA, 76 bp, Artificial Sequence; identical to SEQ ID NO: 7238
  Description of Artificial Sequence: Synthetic Peanut control sequences; 5' sequence + inner sequence + 3' sequence

SEQ ID NO: 39372 - DNA, 76 bp, Artificial Sequence; identical to SEQ ID NO: 7967
  Description of Artificial Sequence: Synthetic Peanut control sequences; 5' sequence + inner sequence + 3' sequence

SEQ ID NO: 39373 - DNA, 76 bp, Artificial Sequence; identical to SEQ ID NO: 23519
  Description of Artificial Sequence: Synthetic Peanut control sequences; 5' sequence + inner sequence + 3' sequence

SEQ ID NO: 39374 - DNA, 76 bp, Artificial Sequence; identical to SEQ ID NO: 3728
  Description of Artificial Sequence: Synthetic Peanut control sequences; 5' sequence + inner sequence + 3' sequence

SEQ ID NO: 39375 - DNA, 76 bp, Artificial Sequence; identical to SEQ ID NO: 7401
  Description of Artificial Sequence: Synthetic Peanut control sequences; 5' sequence + inner sequence + 3' sequence

SEQ ID NO: 39376 - DNA, 76 bp, Artificial Sequence; identical to SEQ ID NO: 27984
  Description of Artificial Sequence: Synthetic Peanut control sequences; 5' sequence + inner sequence + 3' sequence

SEQ ID NO: 39377 - DNA, 76 bp, Artificial Sequence; identical to SEQ ID NO: 3506
  Description of Artificial Sequence: Synthetic Peanut control sequences; 5' sequence + inner sequence + 3' sequence

SEQ ID NO: 39378 - DNA, 76 bp, Artificial Sequence; identical to SEQ ID NO: 7592
  Description of Artificial Sequence: Synthetic Peanut control sequences; 5' sequence + inner sequence + 3' sequence

SEQ ID NO: 39379 - DNA, 76 bp, Artificial Sequence; identical to SEQ ID NO: 7513
  Description of Artificial Sequence: Synthetic Peanut control sequences; 5' sequence + inner sequence + 3' sequence

SEQ ID NO: 39380 - DNA, 76 bp, Artificial Sequence; identical to SEQ ID NO: 3696
  Description of Artificial Sequence: Synthetic Peanut control sequences; 5' sequence + inner sequence + 3' sequence

SEQ ID NO: 39381 - DNA, 76 bp, Artificial Sequence; identical to SEQ ID NO: 3227
  Description of Artificial Sequence: Synthetic Peanut control sequences; 5' sequence + inner sequence + 3' sequence

SEQ ID NO: 39382 - DNA, 76 bp, Artificial Sequence; identical to SEQ ID NO: 3570
  Description of Artificial Sequence: Synthetic Peanut control sequences; 5' sequence + inner sequence + 3' sequence

SEQ ID NO: 39383 - DNA, 76 bp, Artificial Sequence; identical to SEQ ID NO: 3540
  Description of Artificial Sequence: Synthetic Peanut control sequences; 5' sequence + inner sequence + 3' sequence

SEQ ID NO: 39384 - DNA, 76 bp, Artificial Sequence
  Description of Artificial Sequence: Synthetic Peanut control sequences; 5' sequence + inner sequence + 3' sequence
tagggaagagaaggacatatgatggcctgatcgaacctagagagtggcgtgtattgactagtacatgaccacttga

SEQ ID NO: 39385 - DNA, 76 bp, Artificial Sequence; identical to SEQ ID NO: 3647
  Description of Artificial Sequence: Synthetic Peanut control sequences; 5' sequence + inner sequence + 3' sequence

SEQ ID NO: 39386 - DNA, 76 bp, Artificial Sequence; identical to SEQ ID NO: 3581
  Description of Artificial Sequence: Synthetic Peanut control sequences; 5' sequence + inner sequence + 3' sequence

SEQ ID NO: 39387 - DNA, 76 bp, Artificial Sequence; identical to SEQ ID NO: 3414
  Description of Artificial Sequence: Synthetic Peanut control sequences; 5' sequence + inner sequence + 3' sequence

SEQ ID NO: 39388 - DNA, 76 bp, Artificial Sequence; identical to SEQ ID NO: 3789
  Description of Artificial Sequence: Synthetic Peanut control sequences; 5' sequence + inner sequence + 3' sequence

SEQ ID NO: 39389 - DNA, 76 bp, Artificial Sequence; identical to SEQ ID NO: 3062
  Description of Artificial Sequence: Synthetic Peanut control sequences; 5' sequence + inner sequence + 3' sequence

SEQ ID NO: 39390 - DNA, 76 bp, Artificial Sequence; identical to SEQ ID NO: 3738
  Description of Artificial Sequence: Synthetic Peanut control sequences; 5' sequence + inner sequence + 3' sequence

SEQ ID NO: 39391 - DNA, 76 bp, Artificial Sequence; identical to SEQ ID NO: 3813
  Description of Artificial Sequence: Synthetic Peanut control sequences; 5' sequence + inner sequence + 3' sequence

SEQ ID NO: 39392 - DNA, 76 bp, Artificial Sequence; identical to SEQ ID NO: 3787
  Description of Artificial Sequence: Synthetic Peanut control sequences; 5' sequence + inner sequence + 3' sequence

SEQ ID NO: 39393 - DNA, 76 bp, Artificial Sequence; identical to SEQ ID NO: 15971
  Description of Artificial Sequence: Synthetic Peanut control sequences; 5' sequence + inner sequence + 3' sequence

SEQ ID NO: 39394 - DNA, 76 bp, Artificial Sequence; identical to SEQ ID NO: 3620
  Description of Artificial Sequence: Synthetic Peanut control sequences; 5' sequence + inner sequence + 3' sequence

SEQ ID NO: 39395 - DNA, 76 bp, Artificial Sequence; identical to SEQ ID NO: 3836
  Description of Artificial Sequence: Synthetic Peanut control sequences; 5' sequence + inner sequence + 3' sequence

SEQ ID NO: 39396 - DNA, 76 bp, Artificial Sequence; identical to SEQ ID NO: 3811
  Description of Artificial Sequence: Synthetic Peanut control sequences; 5' sequence + inner sequence + 3' sequence

SEQ ID NO: 39397 - DNA, 76 bp, Artificial Sequence; identical to SEQ ID NO: 31446
  Description of Artificial Sequence: Synthetic Peanut control sequences; 5' sequence + inner sequence + 3' sequence

SEQ ID NO: 39398 - DNA, 77 bp, Artificial Sequence; identical to SEQ ID NO: 3489
  Description of Artificial Sequence: Synthetic Peanut control sequences; 5' sequence + inner sequence + 3' sequence

SEQ ID NO: 39399 - DNA, 76 bp, Artificial Sequence; identical to SEQ ID NO: 3359
  Description of Artificial Sequence: Synthetic Peanut control sequences; 5' sequence + inner sequence + 3' sequence

SEQ ID NO: 39400 - DNA, 76 bp, Artificial Sequence; identical to SEQ ID NO: 7530
  Description of Artificial Sequence: Synthetic Peanut control sequences; 5' sequence + inner sequence + 3' sequence

SEQ ID NO: 39401 - DNA, 76 bp, Artificial Sequence; identical to SEQ ID NO: 3573
  Description of Artificial Sequence: Synthetic Peanut control sequences; 5' sequence + inner sequence + 3' sequence

SEQ ID NO: 39402 - DNA, 76 bp, Artificial Sequence; identical to SEQ ID NO: 3628
  Description of Artificial Sequence: Synthetic Peanut control sequences; 5' sequence + inner sequence + 3' sequence

SEQ ID NO: 39403 - DNA, 76 bp, Artificial Sequence; identical to SEQ ID NO: 3432
  Description of Artificial Sequence: Synthetic Peanut control sequences; 5' sequence + inner sequence + 3' sequence

SEQ ID NO: 39404 - DNA, 76 bp, Artificial Sequence; identical to SEQ ID NO: 3365
  Description of Artificial Sequence: Synthetic Peanut control sequences; 5' sequence + inner sequence + 3' sequence

SEQ ID NO: 39405 - DNA, 76 bp, Artificial Sequence; identical to SEQ ID NO: 11971
  Description of Artificial Sequence: Synthetic Peanut control sequences; 5' sequence + inner sequence + 3' sequence

SEQ ID NO: 39406 - DNA, 76 bp, Artificial Sequence; identical to SEQ ID NO: 3867
  Description of Artificial Sequence: Synthetic Peanut control sequences; 5' sequence + inner sequence + 3' sequence

SEQ ID NO: 39407 - DNA, 76 bp, Artificial Sequence; identical to SEQ ID NO: 3515
  Description of Artificial Sequence: Synthetic Peanut control sequences; 5' sequence + inner sequence + 3' sequence

SEQ ID NO: 39408 - DNA, 76 bp, Artificial Sequence; identical to SEQ ID NO: 7713
  Description of Artificial Sequence: Synthetic Peanut control sequences; 5' sequence + inner sequence + 3' sequence

SEQ ID NO: 39409 - DNA, 76 bp, Artificial Sequence; identical to SEQ ID NO: 11939
  Description of Artificial Sequence: Synthetic Peanut control sequences; 5' sequence + inner sequence + 3' sequence

SEQ ID NO: 39410 - DNA, 76 bp, Artificial Sequence; identical to SEQ ID NO: 3714
  Description of Artificial Sequence: Synthetic Peanut control sequences; 5' sequence + inner sequence + 3' sequence

SEQ ID NO: 39411 - DNA, 76 bp, Artificial Sequence; identical to SEQ ID NO: 11546
  Description of Artificial Sequence: Synthetic Peanut control sequences; 5' sequence + inner sequence + 3' sequence

SEQ ID NO: 39412 - DNA, 76 bp, Artificial Sequence; identical to SEQ ID NO: 3684
  Description of Artificial Sequence: Synthetic Peanut control sequences; 5' sequence + inner sequence + 3' sequence

SEQ ID NO: 39413 - DNA, 76 bp, Artificial Sequence; identical to SEQ ID NO: 3552
  Description of Artificial Sequence: Synthetic Peanut control sequences; 5' sequence + inner sequence + 3' sequence

SEQ ID NO: 39414 - DNA, 76 bp, Artificial Sequence; identical to SEQ ID NO: 3462
  Description of Artificial Sequence: Synthetic Peanut control sequences; 5' sequence + inner sequence + 3' sequence

SEQ ID NO: 39415 - DNA, 76 bp, Artificial Sequence; identical to SEQ ID NO: 3884
  Description of Artificial Sequence: Synthetic Peanut control sequences; 5' sequence + inner sequence + 3' sequence

SEQ ID NO: 39416 - DNA, 76 bp, Artificial Sequence; identical to SEQ ID NO: 3891
  Description of Artificial Sequence: Synthetic Peanut control sequences; 5' sequence + inner sequence + 3' sequence

SEQ ID NO: 39417 - DNA, 76 bp, Artificial Sequence; identical to SEQ ID NO: 15799
  Description of Artificial Sequence: Synthetic Peanut control sequences; 5' sequence + inner sequence + 3' sequence

SEQ ID NO: 39418 - DNA, 76 bp, Artificial Sequence; identical to SEQ ID NO: 3984
  Description of Artificial Sequence: Synthetic Peanut control sequences; 5' sequence + inner sequence + 3' sequence

SEQ ID NO: 39419 - DNA, 75 bp, Artificial Sequence
  Description of Artificial Sequence: Synthetic Peanut control sequences; 5' sequence + inner sequence + 3' sequence
tagggaagagaaggacatatgatccgcacgtagccctatcaagtgcagcatgttgactagtacatgaccacttga

SEQ ID NO: 39420 - DNA, 76 bp, Artificial Sequence; identical to SEQ ID NO: 3527
  Description of Artificial Sequence: Synthetic Peanut control sequences; 5' sequence + inner sequence + 3' sequence

SEQ ID NO: 39421 - DNA, 76 bp, Artificial Sequence; identical to SEQ ID NO: 3750
  Description of Artificial Sequence: Synthetic Peanut control sequences; 5' sequence + inner sequence + 3' sequence

SEQ ID NO: 39422 - DNA, 76 bp, Artificial Sequence; identical to SEQ ID NO: 15958
  Description of Artificial Sequence: Synthetic Peanut control sequences; 5' sequence + inner sequence + 3' sequence

SEQ ID NO: 39423 - DNA, 76 bp, Artificial Sequence; identical to SEQ ID NO: 7860
  Description of Artificial Sequence: Synthetic Peanut control sequences; 5' sequence + inner sequence + 3' sequence

SEQ ID NO: 39424 - DNA, 76 bp, Artificial Sequence; identical to SEQ ID NO: 3393
  Description of Artificial Sequence: Synthetic Peanut control sequences; 5' sequence + inner sequence + 3' sequence

SEQ ID NO: 39425 - DNA, 76 bp, Artificial Sequence; identical to SEQ ID NO: 7336
  Description of Artificial Sequence: Synthetic Peanut control sequences; 5' sequence + inner sequence + 3' sequence

SEQ ID NO: 39426 - DNA, 75 bp, Artificial Sequence; identical to SEQ ID NO: 3642
  Description of Artificial Sequence: Synthetic Peanut control sequences; 5' sequence + inner sequence + 3' sequence

SEQ ID NO: 39427 - DNA, 76 bp, Artificial Sequence; identical to SEQ ID NO: 7792
  Description of Artificial Sequence: Synthetic Peanut control sequences; 5' sequence + inner sequence + 3' sequence

SEQ ID NO: 39428 - DNA, 76 bp, Artificial Sequence; identical to SEQ ID NO: 11868
  Description of Artificial Sequence: Synthetic Peanut control sequences; 5' sequence + inner sequence + 3' sequence

SEQ ID NO: 39429 - DNA, 75 bp, Artificial Sequence; identical to SEQ ID NO: 7869
  Description of Artificial Sequence: Synthetic Peanut control sequences; 5' sequence + inner sequence + 3' sequence

SEQ ID NO: 39430 - DNA, 76 bp, Artificial Sequence; identical to SEQ ID NO: 3791
  Description of Artificial Sequence: Synthetic Peanut control sequences; 5' sequence + inner sequence + 3' sequence

SEQ ID NO: 39431 - DNA, 76 bp, Artificial Sequence; identical to SEQ ID NO: 23783
  Description of Artificial Sequence: Synthetic Peanut control sequences; 5' sequence + inner sequence + 3' sequence

SEQ ID NO: 39432 - DNA, 76 bp, Artificial Sequence
  Description of Artificial Sequence: Synthetic Peanut control sequences; 5' sequence + inner sequence + 3' sequence
tagggaagagaaggacatatgatggacggatcgaacctacaagttgtcgtgtattgactagtacatgaccacttga

SEQ ID NO: 39433 - DNA, 76 bp, Artificial Sequence; identical to SEQ ID NO: 35332
  Description of Artificial Sequence: Synthetic Peanut control sequences; 5' sequence + inner sequence + 3' sequence

SEQ ID NO: 39434 - DNA, 76 bp, Artificial Sequence; identical to SEQ ID NO: 3772
  Description of Artificial Sequence: Synthetic Peanut control sequences; 5' sequence + inner sequence + 3' sequence

SEQ ID NO: 39435 - DNA, 76 bp, Artificial Sequence; identical to SEQ ID NO: 3358
  Description of Artificial Sequence: Synthetic Peanut control sequences; 5' sequence + inner sequence + 3' sequence

SEQ ID NO: 39436 - DNA, 76 bp, Artificial Sequence; identical to SEQ ID NO: 3269
  Description of Artificial Sequence: Synthetic Peanut control sequences; 5' sequence + inner sequence + 3' sequence

SEQ ID NO: 39437 - DNA, 76 bp, Artificial Sequence; identical to SEQ ID NO: 23581
  Description of Artificial Sequence: Synthetic Peanut control sequences; 5' sequence + inner sequence + 3' sequence

SEQ ID NO: 39438 - DNA, 76 bp, Artificial Sequence; identical to SEQ ID NO: 3500
  Description of Artificial Sequence: Synthetic Peanut control sequences; 5' sequence + inner sequence + 3' sequence

SEQ ID NO: 39439 - DNA, 76 bp, Artificial Sequence; identical to SEQ ID NO: 3478
  Description of Artificial Sequence: Synthetic Peanut control sequences; 5' sequence + inner sequence + 3' sequence

SEQ ID NO: 39440 - DNA, 76 bp, Artificial Sequence; identical to SEQ ID NO: 7887
  Description of Artificial Sequence: Synthetic Peanut control sequences; 5' sequence + inner sequence + 3' sequence

SEQ ID NO: 39441 - DNA, 76 bp, Artificial Sequence; identical to SEQ ID NO: 3518
  Description of Artificial Sequence: Synthetic Peanut control sequences; 5' sequence + inner sequence + 3' sequence

SEQ ID NO: 39442 - DNA, 74 bp, Artificial Sequence; identical to SEQ ID NO: 15885
  Description of Artificial Sequence: Synthetic Peanut control sequences; 5' sequence + inner sequence + 3' sequence

SEQ ID NO: 39443 - DNA, 76 bp, Artificial Sequence; identical to SEQ ID NO: 3104
  Description of Artificial Sequence: Synthetic Peanut control sequences; 5' sequence + inner sequence + 3' sequence

SEQ ID NO: 39444 - DNA, 76 bp, Artificial Sequence; identical to SEQ ID NO: 3994
  Description of Artificial Sequence: Synthetic Peanut control sequences; 5' sequence + inner sequence + 3' sequence

SEQ ID NO: 39445 - DNA, 76 bp, Artificial Sequence; identical to SEQ ID NO: 35719
  Description of Artificial Sequence: Synthetic Peanut control sequences; 5' sequence + inner sequence + 3' sequence

SEQ ID NO: 39446 - DNA, 76 bp, Artificial Sequence; identical to SEQ ID NO: 3279
  Description of Artificial Sequence: Synthetic Peanut control sequences; 5' sequence + inner sequence + 3' sequence

SEQ ID NO: 39447 - DNA, 76 bp, Artificial Sequence; identical to SEQ ID NO: 3399
  Description of Artificial Sequence: Synthetic Peanut control sequences; 5' sequence + inner sequence + 3' sequence

SEQ ID NO: 39448 - DNA, 76 bp, Artificial Sequence; identical to SEQ ID NO: 3134
  Description of Artificial Sequence: Synthetic Peanut control sequences; 5' sequence + inner sequence + 3' sequence

SEQ ID NO: 39449 - DNA, 76 bp, Artificial Sequence; identical to SEQ ID NO: 3436
  Description of Artificial Sequence: Synthetic Peanut control sequences; 5' sequence + inner sequence + 3' sequence

SEQ ID NO: 39450 - DNA, 76 bp, Artificial Sequence; identical to SEQ ID NO: 3228
  Description of Artificial Sequence: Synthetic Peanut control sequences; 5' sequence + inner sequence + 3' sequence

SEQ ID NO: 39451 - DNA, 76 bp, Artificial Sequence; identical to SEQ ID NO: 3943
  Description of Artificial Sequence: Synthetic Peanut control sequences; 5' sequence + inner sequence + 3' sequence

SEQ ID NO: 39452 - DNA, 76 bp, Artificial Sequence; identical to SEQ ID NO: 7317
  Description of Artificial Sequence: Synthetic Peanut control sequences; 5' sequence + inner sequence + 3' sequence

SEQ ID NO: 39453 - DNA, 75 bp, Artificial Sequence; identical to SEQ ID NO: 3873
  Description of Artificial Sequence: Synthetic Peanut control sequences; 5' sequence + inner sequence + 3' sequence

SEQ ID NO: 39454 - DNA, 76 bp, Artificial Sequence; identical to SEQ ID NO: 31849
  Description of Artificial Sequence: Synthetic Peanut control sequences; 5' sequence + inner sequence + 3' sequence

SEQ ID NO: 39455 - DNA, 76 bp, Artificial Sequence; identical to SEQ ID NO: 8001
  Description of Artificial Sequence: Synthetic Peanut control sequences; 5' sequence + inner sequence + 3' sequence

SEQ ID NO: 39456 - DNA, 76 bp, Artificial Sequence
  Description of Artificial Sequence: Synthetic Peanut control sequences; 5' sequence + inner sequence + 3' sequence
tagggaagagaaggacatatgatccatctcgacccgtcacgtggtgcatggccttgactagtacatgaccacttga

SEQ ID NO: 39457 - DNA, 76 bp, Artificial Sequence; identical to SEQ ID NO: 7997
  Description of Artificial Sequence: Synthetic Peanut control sequences; 5' sequence + inner sequence + 3' sequence

SEQ ID NO: 39458 - DNA, 76 bp, Artificial Sequence; identical to SEQ ID NO: 3831
  Description of Artificial Sequence: Synthetic Peanut control sequences; 5' sequence + inner sequence + 3' sequence

SEQ ID NO: 39459 - DNA, 76 bp, Artificial Sequence; identical to SEQ ID NO: 3108
  Description of Artificial Sequence: Synthetic Peanut control sequences; 5' sequence + inner sequence + 3' sequence

SEQ ID NO: 39460 - DNA, 76 bp, Artificial Sequence; identical to SEQ ID NO: 3198
  Description of Artificial Sequence: Synthetic Peanut control sequences; 5' sequence + inner sequence + 3' sequence

SEQ ID NO: 39461 - DNA, 76 bp, Artificial Sequence; identical to SEQ ID NO: 3513
  Description of Artificial Sequence: Synthetic Peanut control sequences; 5' sequence + inner sequence + 3' sequence

SEQ ID NO: 39462 - DNA, 76 bp, Artificial Sequence; identical to SEQ ID NO: 15673
  Description of Artificial Sequence: Synthetic Peanut control sequences; 5' sequence + inner sequence + 3' sequence

SEQ ID NO: 39463 - DNA, 76 bp, Artificial Sequence; identical to SEQ ID NO: 3268
  Description of Artificial Sequence: Synthetic Peanut control sequences; 5' sequence + inner sequence + 3' sequence

SEQ ID NO: 39464 - DNA, 76 bp, Artificial Sequence; identical to SEQ ID NO: 3530
  Description of Artificial Sequence: Synthetic Peanut control sequences; 5' sequence + inner sequence + 3' sequence

SEQ ID NO: 39465 - DNA, 76 bp, Artificial Sequence; identical to SEQ ID NO: 7644
  Description of Artificial Sequence: Synthetic Peanut control sequences; 5' sequence + inner sequence + 3' sequence

SEQ ID NO: 39466 - DNA, 76 bp, Artificial Sequence; identical to SEQ ID NO: 11712
  Description of Artificial Sequence: Synthetic Peanut control sequences; 5' sequence + inner sequence + 3' sequence

SEQ ID NO: 39467 - DNA, 76 bp, Artificial Sequence; identical to SEQ ID NO: 3475
  Description of Artificial Sequence: Synthetic Peanut control sequences; 5' sequence + inner sequence + 3' sequence

SEQ ID NO: 39468 - DNA, 76 bp, Artificial Sequence; identical to SEQ ID NO: 3129
  Description of Artificial Sequence: Synthetic Peanut control sequences; 5' sequence + inner sequence + 3' sequence

SEQ ID NO: 39469 - DNA, 76 bp, Artificial Sequence
  Description of Artificial Sequence: Synthetic Peanut control sequences; 5' sequence + inner sequence + 3' sequence
tagggaagagaaggacatatgatggacggatcgaacctacaagttggcgtggattgactagtacatgaccacttga

SEQ ID NO: 39470 - DNA, 76 bp, Artificial Sequence; identical to SEQ ID NO: 3915
  Description of Artificial Sequence: Synthetic Peanut control sequences; 5' sequence + inner sequence + 3' sequence

SEQ ID NO: 39471 - DNA, 76 bp, Artificial Sequence; identical to SEQ ID NO: 3807
  Description of Artificial Sequence: Synthetic Peanut control sequences; 5' sequence + inner sequence + 3' sequence

SEQ ID NO: 39472 - DNA, 76 bp, Artificial Sequence; identical to SEQ ID NO: 7503
  Description of Artificial Sequence: Synthetic Peanut control sequences; 5' sequence + inner sequence + 3' sequence

SEQ ID NO: 39473 - DNA, 76 bp, Artificial Sequence; identical to SEQ ID NO: 7688
  Description of Artificial Sequence: Synthetic Peanut control sequences; 5' sequence + inner sequence + 3' sequence

SEQ ID NO: 39474 - DNA, 76 bp, Artificial Sequence; identical to SEQ ID NO: 3920
  Description of Artificial Sequence: Synthetic Peanut control sequences; 5' sequence + inner sequence + 3' sequence

SEQ ID NO: 39475 - DNA, 76 bp, Artificial Sequence; identical to SEQ ID NO: 3102
  Description of Artificial Sequence: Synthetic Peanut control sequences; 5' sequence + inner sequence + 3' sequence

SEQ ID NO: 39476 - DNA, 76 bp, Artificial Sequence; identical to SEQ ID NO: 3577
  Description of Artificial Sequence: Synthetic Peanut control sequences; 5' sequence + inner sequence + 3' sequence

SEQ ID NO: 39477 - DNA, 76 bp, Artificial Sequence; identical to SEQ ID NO: 3746
  Description of Artificial Sequence: Synthetic Peanut control sequences; 5' sequence + inner sequence + 3' sequence

SEQ ID NO: 39478 - DNA, 76 bp, Artificial Sequence; identical to SEQ ID NO: 3660
  Description of Artificial Sequence: Synthetic Peanut control sequences; 5' sequence + inner sequence + 3' sequence

SEQ ID NO: 39479 - DNA, 76 bp, Artificial Sequence; identical to SEQ ID NO: 7775
  Description of Artificial Sequence: Synthetic Peanut control sequences; 5' sequence + inner sequence + 3' sequence

SEQ ID NO: 39480 - DNA, 76 bp, Artificial Sequence; identical to SEQ ID NO: 3777
  Description of Artificial Sequence: Synthetic Peanut control sequences; 5' sequence + inner sequence + 3' sequence

SEQ ID NO: 39481 - DNA, 76 bp, Artificial Sequence; identical to SEQ ID NO: 3877
  Description of Artificial Sequence: Synthetic Peanut control sequences; 5' sequence + inner sequence + 3' sequence

SEQ ID NO: 39482 - DNA, 76 bp, Artificial Sequence
  Description of Artificial Sequence: Synthetic Peanut control sequences; 5' sequence + inner sequence + 3' sequence
tagggaagagaaggacatatgattgtccgatcgaccctatcaagtgcagcatgttgactagtacatgaccacttga

SEQ ID NO: 39483 - DNA, 74 bp, Artificial Sequence; identical to SEQ ID NO: 23321
  Description of Artificial Sequence: Synthetic Peanut control sequences; 5' sequence + inner sequence + 3' sequence

SEQ ID NO: 39484 - DNA, 76 bp, Artificial Sequence; identical to SEQ ID NO: 3574
  Description of Artificial Sequence: Synthetic Peanut control sequences; 5' sequence + inner sequence + 3' sequence

SEQ ID NO: 39485 - DNA, 76 bp, Artificial Sequence; identical to SEQ ID NO: 7913
  Description of Artificial Sequence: Synthetic Peanut control sequences; 5' sequence + inner sequence + 3' sequence

SEQ ID NO: 39486 - DNA, 77 bp, Artificial Sequence; identical to SEQ ID NO: 7619
  Description of Artificial Sequence: Synthetic Peanut control sequences; 5' sequence + inner sequence + 3' sequence

SEQ ID NO: 39487 - DNA, 76 bp, Artificial Sequence; identical to SEQ ID NO: 7856
  Description of Artificial Sequence: Synthetic Peanut control sequences; 5' sequence + inner sequence + 3' sequence

SEQ ID NO: 39488 - DNA, 75 bp, Artificial Sequence; identical to SEQ ID NO: 11977
  Description of Artificial Sequence: Synthetic Peanut control sequences; 5' sequence + inner sequence + 3' sequence

SEQ ID NO: 39489 - DNA, 76 bp, Artificial Sequence; identical to SEQ ID NO: 31350
  Description of Artificial Sequence: Synthetic Peanut control sequences; 5' sequence + inner sequence + 3' sequence

SEQ ID NO: 39490 - DNA, 78 bp, Artificial Sequence
  Description of Artificial Sequence: Synthetic Peanut control sequences; 5' sequence + inner sequence + 3' sequence
tagggaagagaaggacatatgatgtcacggaacgaagcctatcaagtgcagcatgttgactagtacatgaccacttga

SEQ ID NO: 39491 - DNA, 76 bp, Artificial Sequence; identical to SEQ ID NO: 3617
  Description of Artificial Sequence: Synthetic Peanut control sequences; 5' sequence + inner sequence + 3' sequence

SEQ ID NO: 39492 - DNA, 76 bp, Artificial Sequence; identical to SEQ ID NO: 4002
  Description of Artificial Sequence: Synthetic Peanut control sequences; 5' sequence + inner sequence + 3' sequence

SEQ ID NO: 39493 - DNA, 76 bp, Artificial Sequence; identical to SEQ ID NO: 3805
  Description of Artificial Sequence: Synthetic Peanut control sequences; 5' sequence + inner sequence + 3' sequence

SEQ ID NO: 39494 - DNA, 74 bp, Artificial Sequence; identical to SEQ ID NO: 3241
  Description of Artificial Sequence: Synthetic Peanut control sequences; 5' sequence + inner sequence + 3' sequence

SEQ ID NO: 39495 - DNA, 76 bp, Artificial Sequence; identical to SEQ ID NO: 7999
  Description of Artificial Sequence: Synthetic Peanut control sequences; 5' sequence + inner sequence + 3' sequence

SEQ ID NO: 39496 - DNA, 76 bp, Artificial Sequence; identical to SEQ ID NO: 3419
  Description of Artificial Sequence: Synthetic Peanut control sequences; 5' sequence + inner sequence + 3' sequence

SEQ ID NO: 39497 - DNA, 76 bp, Artificial Sequence; identical to SEQ ID NO: 3625
  Description of Artificial Sequence: Synthetic Peanut control sequences; 5' sequence + inner sequence + 3' sequence

SEQ ID NO: 39498 - DNA, 76 bp, Artificial Sequence; identical to SEQ ID NO: 3158
  Description of Artificial Sequence: Synthetic Peanut control sequences; 5' sequence + inner sequence + 3' sequence

SEQ ID NO: 39499 - DNA, 76 bp, Artificial Sequence; identical to SEQ ID NO: 7535
  Description of Artificial Sequence: Synthetic Peanut control sequences; 5' sequence + inner sequence + 3' sequence

SEQ ID NO: 39500 - DNA, 76 bp, Artificial Sequence
  Description of Artificial Sequence: Synthetic Peanut control sequences; 5' sequence + inner sequence + 3' sequence
tagggaagagaaggacatatgatcggccgatcgaccctatcaagtgcagcatgttgactagtacatgaccacttga

SEQ ID NO: 39501 - DNA, 76 bp, Artificial Sequence; identical to SEQ ID NO: 3183
  Description of Artificial Sequence: Synthetic Peanut control sequences; 5' sequence + inner sequence + 3' sequence

SEQ ID NO: 39502 - DNA, 76 bp, Artificial Sequence; identical to SEQ ID NO: 27927
  Description of Artificial Sequence: Synthetic Peanut control sequences; 5' sequence + inner sequence + 3' sequence

SEQ ID NO: 39503 - DNA, 76 bp, Artificial Sequence; identical to SEQ ID NO: 3431
  Description of Artificial Sequence: Synthetic Peanut control sequences; 5' sequence + inner sequence + 3' sequence

SEQ ID NO: 39504 - DNA, 76 bp, Artificial Sequence
  Description of Artificial Sequence: Synthetic Peanut control sequences; 5' sequence + inner sequence + 3' sequence
tagggaagagaaggacatatgatccatctcgcgctcctacgtggccatgcactttgactagtacatgaccacttga

SEQ ID NO: 39505 - DNA, 76 bp, Artificial Sequence; identical to SEQ ID NO: 3579
  Description of Artificial Sequence: Synthetic Peanut control sequences; 5' sequence + inner sequence + 3' sequence

SEQ ID NO: 39506 - DNA, 76 bp, Artificial Sequence
  Description of Artificial Sequence: Synthetic Peanut control sequences; 5' sequence + inner sequence + 3' sequence
tagggaagagaaggacatatgattgtgtgcctgaacgacctacacgtggctcattgactagtacatgaccacttga

SEQ ID NO: 39507 - DNA, 76 bp, Artificial Sequence; identical to SEQ ID NO: 31317
  Description of Artificial Sequence: Synthetic Peanut control sequences; 5' sequence + inner sequence + 3' sequence

SEQ ID NO: 39508 - DNA, 76 bp, Artificial Sequence; identical to SEQ ID NO: 3455
  Description of Artificial Sequence: Synthetic Peanut control sequences; 5' sequence + inner sequence + 3' sequence

SEQ ID NO: 39509 - DNA, 76 bp, Artificial Sequence; identical to SEQ ID NO: 3685
  Description of Artificial Sequence: Synthetic Peanut control sequences; 5' sequence + inner sequence + 3' sequence

SEQ ID NO: 39510 - DNA, 76 bp, Artificial Sequence; identical to SEQ ID NO: 7787
  Description of Artificial Sequence: Synthetic Peanut control sequences; 5' sequence + inner sequence + 3' sequence

SEQ ID NO: 39511 - DNA, 76 bp, Artificial Sequence
  Description of Artificial Sequence: Synthetic Peanut control sequences; 5' sequence + inner sequence + 3' sequence
tagggaagagaaggacatatgatcgcgatcacgtccgttcccttcgagtggccttgactagtacatgaccacttga

SEQ ID NO: 39512 - DNA, 76 bp, Artificial Sequence; identical to SEQ ID NO: 3701
  Description of Artificial Sequence: Synthetic Peanut control sequences; 5' sequence + inner sequence + 3' sequence

SEQ ID NO: 39513 - DNA, 76 bp, Artificial Sequence; identical to SEQ ID NO: 3670
  Description of Artificial Sequence: Synthetic Peanut control sequences; 5' sequence + inner sequence + 3' sequence

SEQ ID NO: 39514 - DNA, 76 bp, Artificial Sequence
  Description of Artificial Sequence: Synthetic Peanut control sequences; 5' sequence + inner sequence + 3' sequence
tagggaagagaaggacatatgattggcttgcatgctggacttcctactggtttttgactagtacatgaccacttga

SEQ ID NO: 39515 - DNA, 75 bp, Artificial Sequence; identical to SEQ ID NO: 35972
  Description of Artificial Sequence: Synthetic Peanut control sequences; 5' sequence + inner sequence + 3' sequence

SEQ ID NO: 39516 - DNA, 76 bp, Artificial Sequence
  Description of Artificial Sequence: Synthetic Peanut control sequences; 5' sequence + inner sequence + 3' sequence
tagggaagagaaggacatatgatcgtactgaacgcaccctcacaagtggcgcattgactagtacatgaccacttga

SEQ ID NO: 39517 - DNA, 76 bp, Artificial Sequence; identical to SEQ ID NO: 3157
  Description of Artificial Sequence: Synthetic Peanut control sequences; 5' sequence + inner sequence + 3' sequence

SEQ ID NO: 39518 - DNA, 76 bp, Artificial Sequence; identical to SEQ ID NO: 27630
  Description of Artificial Sequence: Synthetic Peanut control sequences; 5' sequence + inner sequence + 3' sequence

SEQ ID NO: 39519 - DNA, 76 bp, Artificial Sequence; identical to SEQ ID NO: 3220
  Description of Artificial Sequence: Synthetic Peanut control sequences; 5' sequence + inner sequence + 3' sequence

SEQ ID NO: 39520 - DNA, 76 bp, Artificial Sequence; identical to SEQ ID NO: 3090
  Description of Artificial Sequence: Synthetic Peanut control sequences; 5' sequence + inner sequence + 3' sequence

SEQ ID NO: 39521 - DNA, 76 bp, Artificial Sequence; identical to SEQ ID NO: 3776
  Description of Artificial Sequence: Synthetic Peanut control sequences; 5' sequence + inner sequence + 3' sequence

SEQ ID NO: 39522 - DNA, 77 bp, Artificial Sequence; identical to SEQ ID NO: 35291
  Description of Artificial Sequence: Synthetic Peanut control sequences; 5' sequence + inner sequence + 3' sequence

SEQ ID NO: 39523 - DNA, 76 bp, Artificial Sequence; identical to SEQ ID NO: 7312
  Description of Artificial Sequence: Synthetic Peanut control sequences; 5' sequence + inner sequence + 3' sequence

SEQ ID NO: 39524 - DNA, 76 bp, Artificial Sequence; identical to SEQ ID NO: 3523
  Description of Artificial Sequence: Synthetic Peanut control sequences; 5' sequence + inner sequence + 3' sequence

SEQ ID NO: 39525 - DNA, 76 bp, Artificial Sequence; identical to SEQ ID NO: 3912
  Description of Artificial Sequence: Synthetic Peanut control sequences; 5' sequence + inner sequence + 3' sequence

SEQ ID NO: 39526 - DNA, 76 bp, Artificial Sequence; identical to SEQ ID NO: 3084
  Description of Artificial Sequence: Synthetic Peanut control sequences; 5' sequence + inner sequence + 3' sequence

SEQ ID NO: 39527 - DNA, 76 bp, Artificial Sequence
  Description of Artificial Sequence: Synthetic Peanut control sequences; 5' sequence + inner sequence + 3' sequence
tagggaagagaaggacatatgatgtacgcgtcgaccttcaagtgtgccgtggattgactagtacatgaccacttga

SEQ ID NO: 39528 - DNA, 76 bp, Artificial Sequence; identical to SEQ ID NO: 3397
  Description of Artificial Sequence: Synthetic Peanut control sequences; 5' sequence + inner sequence + 3' sequence

SEQ ID NO: 39529 - DNA, 76 bp, Artificial Sequence; identical to SEQ ID NO: 7807
  Description of Artificial Sequence: Synthetic Peanut control sequences; 5' sequence + inner sequence + 3' sequence

SEQ ID NO: 39530 - DNA, 76 bp, Artificial Sequence; identical to SEQ ID NO: 3900
  Description of Artificial Sequence: Synthetic Peanut control sequences; 5' sequence + inner sequence + 3' sequence

SEQ ID NO: 39531 - DNA, 76 bp, Artificial Sequence; identical to SEQ ID NO: 7616
  Description of Artificial Sequence: Synthetic Peanut control sequences; 5' sequence + inner sequence + 3' sequence

SEQ ID NO: 39532 - DNA, 76 bp, Artificial Sequence; identical to SEQ ID NO: 3426
  Description of Artificial Sequence: Synthetic Peanut control sequences; 5' sequence + inner sequence + 3' sequence

SEQ ID NO: 39533 - DNA, 76 bp, Artificial Sequence; identical to SEQ ID NO: 31427
  Description of Artificial Sequence: Synthetic Peanut control sequences; 5' sequence + inner sequence + 3' sequence

SEQ ID NO: 39534 - DNA, 76 bp, Artificial Sequence; identical to SEQ ID NO: 3622
  Description of Artificial Sequence: Synthetic Peanut control sequences; 5' sequence + inner sequence + 3' sequence

SEQ ID NO: 39535 - DNA, 76 bp, Artificial Sequence; identical to SEQ ID NO: 3680
  Description of Artificial Sequence: Synthetic Peanut control sequences; 5' sequence + inner sequence + 3' sequence

SEQ ID NO: 39536 - DNA, 76 bp, Artificial Sequence; identical to SEQ ID NO: 7939
  Description of Artificial Sequence: Synthetic Peanut control sequences; 5' sequence + inner sequence + 3' sequence

SEQ ID NO: 39537 - DNA, 76 bp, Artificial Sequence; identical to SEQ ID NO: 3634
  Description of Artificial Sequence: Synthetic Peanut control sequences; 5' sequence + inner sequence + 3' sequence

SEQ ID NO: 39538 - DNA, 76 bp, Artificial Sequence; identical to SEQ ID NO: 11860
  Description of Artificial Sequence: Synthetic Peanut control sequences; 5' sequence + inner sequence + 3' sequence

SEQ ID NO: 39539 - DNA, 76 bp, Artificial Sequence; identical to SEQ ID NO: 3173
  Description of Artificial Sequence: Synthetic Peanut control sequences; 5' sequence + inner sequence + 3' sequence

SEQ ID NO: 39540 - DNA, 76 bp, Artificial Sequence; identical to SEQ ID NO: 3808
  Description of Artificial Sequence: Synthetic Peanut control sequences; 5' sequence + inner sequence + 3' sequence

SEQ ID NO: 39541 - DNA, 76 bp, Artificial Sequence; identical to SEQ ID NO: 3671
  Description of Artificial Sequence: Synthetic Peanut control sequences; 5' sequence + inner sequence + 3' sequence

SEQ ID NO: 39542 - DNA, 76 bp, Artificial Sequence; identical to SEQ ID NO: 15581
  Description of Artificial Sequence: Synthetic Peanut control sequences; 5' sequence + inner sequence + 3' sequence

SEQ ID NO: 39543 - DNA, 76 bp, Artificial Sequence; identical to SEQ ID NO: 7603
  Description of Artificial Sequence: Synthetic Peanut control sequences; 5' sequence + inner sequence + 3' sequence

SEQ ID NO: 39544 - DNA, 76 bp, Artificial Sequence; identical to SEQ ID NO: 7230
  Description of Artificial Sequence: Synthetic Peanut control sequences; 5' sequence + inner sequence + 3' sequence

SEQ ID NO: 39545 - DNA, 76 bp, Artificial Sequence; identical to SEQ ID NO: 15985
  Description of Artificial Sequence: Synthetic Peanut control sequences; 5' sequence + inner sequence + 3' sequence

SEQ ID NO: 39546 - DNA, 76 bp, Artificial Sequence
  Description of Artificial Sequence: Synthetic Peanut control sequences; 5' sequence + inner sequence + 3' sequence
tagggaagagaaggacatatgatacgtccgcactccttgccatacacgtgggcttgactagtacatgaccacttga

SEQ ID NO: 39547 - DNA, 76 bp, Artificial Sequence; identical to SEQ ID NO: 3559
  Description of Artificial Sequence: Synthetic Peanut control sequences; 5' sequence + inner sequence + 3' sequence

SEQ ID NO: 39548 - DNA, 74 bp, Artificial Sequence
  Description of Artificial Sequence: Synthetic Peanut control sequences; 5' sequence + inner sequence + 3' sequence
tagggaagagaaggacatatgatccgcacgtagccctatcatgaggccatgttgactagtacatgaccacttga

SEQ ID NO: 39549 - DNA, 76 bp, Artificial Sequence; identical to SEQ ID NO: 3521
  Description of Artificial Sequence: Synthetic Peanut control sequences; 5' sequence + inner sequence + 3' sequence

SEQ ID NO: 39550 - DNA, 76 bp, Artificial Sequence; identical to SEQ ID NO: 3921
  Description of Artificial Sequence: Synthetic Peanut control sequences; 5' sequence + inner sequence + 3' sequence

SEQ ID NO: 39551 - DNA, 76 bp, Artificial Sequence
  Description of Artificial Sequence: Synthetic Peanut control sequences; 5' sequence + inner sequence + 3' sequence
tagggaagagaaggacatatgatgtgcgcactcttgccttccagtggttcgtgttgactagtacatgaccacttga

SEQ ID NO: 39552 - DNA, 76 bp, Artificial Sequence
  Description of Artificial Sequence: Synthetic Peanut control sequences; 5' sequence + inner sequence + 3' sequence
tagggaagagaaggacatatgatcatgctctgaccgtggcaggaacgctgtcattgactagtacatgaccacttga

SEQ ID NO: 39553 - DNA, 76 bp, Artificial Sequence; identical to SEQ ID NO: 23229
  Description of Artificial Sequence: Synthetic Peanut control sequences; 5' sequence + inner sequence + 3' sequence

SEQ ID NO: 39554 - DNA, 76 bp, Artificial Sequence; identical to SEQ ID NO: 3385
  Description of Artificial Sequence: Synthetic Peanut control sequences; 5' sequence + inner sequence + 3' sequence

SEQ ID NO: 39555 - DNA, 76 bp, Artificial Sequence; identical to SEQ ID NO: 27843
  Description of Artificial Sequence: Synthetic Peanut control sequences; 5' sequence + inner sequence + 3' sequence

SEQ ID NO: 39556 - DNA, 76 bp, Artificial Sequence; identical to SEQ ID NO: 31702
  Description of Artificial Sequence: Synthetic Peanut control sequences; 5' sequence + inner sequence + 3' sequence

SEQ ID NO: 39557 - DNA, 76 bp, Artificial Sequence; identical to SEQ ID NO: 31823
  Description of Artificial Sequence: Synthetic Peanut control sequences; 5' sequence + inner sequence + 3' sequence

SEQ ID NO: 39558 - DNA, 76 bp, Artificial Sequence; identical to SEQ ID NO: 7492
  Description of Artificial Sequence: Synthetic Peanut control sequences; 5' sequence + inner sequence + 3' sequence

SEQ ID NO: 39559 - DNA, 76 bp, Artificial Sequence; identical to SEQ ID NO: 31513
  Description of Artificial Sequence: Synthetic Peanut control sequences; 5' sequence + inner sequence + 3' sequence

SEQ ID NO: 39560 - DNA, 76 bp, Artificial Sequence; identical to SEQ ID NO: 3677
  Description of Artificial Sequence: Synthetic Peanut control sequences; 5' sequence + inner sequence + 3' sequence

SEQ ID NO: 39561 - DNA, 76 bp, Artificial Sequence; identical to SEQ ID NO: 11844
  Description of Artificial Sequence: Synthetic Peanut control sequences; 5' sequence + inner sequence + 3' sequence

SEQ ID NO: 39562 - DNA, 76 bp, Artificial Sequence; identical to SEQ ID NO: 7381
  Description of Artificial Sequence: Synthetic Peanut control sequences; 5' sequence + inner sequence + 3' sequence

SEQ ID NO: 39563 - DNA, 76 bp, Artificial Sequence; identical to SEQ ID NO: 31257
  Description of Artificial Sequence: Synthetic Peanut control sequences; 5' sequence + inner sequence + 3' sequence

SEQ ID NO: 39564 - DNA, 76 bp, Artificial Sequence; identical to SEQ ID NO: 3367
  Description of Artificial Sequence: Synthetic Peanut control sequences; 5' sequence + inner sequence + 3' sequence

SEQ ID NO: 39565 - DNA, 74 bp, Artificial Sequence; identical to SEQ ID NO: 7786
  Description of Artificial Sequence: Synthetic Peanut control sequences; 5' sequence + inner sequence + 3' sequence

SEQ ID NO: 39566 - DNA, 75 bp, Artificial Sequence; identical to SEQ ID NO: 7968
  Description of Artificial Sequence: Synthetic Peanut control sequences; 5' sequence + inner sequence + 3' sequence

SEQ ID NO: 39567 - DNA, 76 bp, Artificial Sequence; identical to SEQ ID NO: 3246
  Description of Artificial Sequence: Synthetic Peanut control sequences; 5' sequence + inner sequence + 3' sequence

SEQ ID NO: 39568 - DNA, 76 bp, Artificial Sequence; identical to SEQ ID NO: 3280
  Description of Artificial Sequence: Synthetic Peanut control sequences; 5' sequence + inner sequence + 3' sequence

SEQ ID NO: 39569 - DNA, 76 bp, Artificial Sequence; identical to SEQ ID NO: 3098
  Description of Artificial Sequence: Synthetic Peanut control sequences; 5' sequence + inner sequence + 3' sequence

SEQ ID NO: 39570 - DNA, 76 bp, Artificial Sequence; identical to SEQ ID NO: 3768
  Description of Artificial Sequence: Synthetic Peanut control sequences; 5' sequence + inner sequence + 3' sequence

SEQ ID NO: 39571 - DNA, 76 bp, Artificial Sequence; identical to SEQ ID NO: 7472
  Description of Artificial Sequence: Synthetic Peanut control sequences; 5' sequence + inner sequence + 3' sequence

SEQ ID NO: 39572 - DNA, 76 bp, Artificial Sequence; identical to SEQ ID NO: 27527
  Description of Artificial Sequence: Synthetic Peanut control sequences; 5' sequence + inner sequence + 3' sequence

SEQ ID NO: 39573 - DNA, 71 bp, Artificial Sequence; identical to SEQ ID NO: 3427
  Description of Artificial Sequence: Synthetic Peanut control sequences; 5' sequence + inner sequence + 3' sequence

SEQ ID NO: 39574 - DNA, 76 bp, Artificial Sequence; identical to SEQ ID NO: 3467
  Description of Artificial Sequence: Synthetic Peanut control sequences; 5' sequence + inner sequence + 3' sequence

SEQ ID NO: 39575 - DNA, 76 bp, Artificial Sequence; identical to SEQ ID NO: 3296
  Description of Artificial Sequence: Synthetic Peanut control sequences; 5' sequence + inner sequence + 3' sequence

SEQ ID NO: 39576 - DNA, 76 bp, Artificial Sequence; identical to SEQ ID NO: 7748
  Description of Artificial Sequence: Synthetic Peanut control sequences; 5' sequence + inner sequence + 3' sequence

SEQ ID NO: 39577 - DNA, 76 bp, Artificial Sequence; identical to SEQ ID NO: 3265
  Description of Artificial Sequence: Synthetic Peanut control sequences; 5' sequence + inner sequence + 3' sequence

SEQ ID NO: 39578 - DNA, 76 bp, Artificial Sequence; identical to SEQ ID NO: 3632
  Description of Artificial Sequence: Synthetic Peanut control sequences; 5' sequence + inner sequence + 3' sequence

SEQ ID NO: 39579 - DNA, 74 bp, Artificial Sequence
  Description of Artificial Sequence: Synthetic Peanut control sequences; 5' sequence + inner sequence + 3' sequence
tagggaagagaaggacatatgattggccgatcgaccctatcaagtgcgacattgactagtacatgaccacttga

SEQ ID NO: 39580 - DNA, 76 bp, Artificial Sequence; identical to SEQ ID NO: 3857
  Description of Artificial Sequence: Synthetic Peanut control sequences; 5' sequence + inner sequence + 3' sequence

SEQ ID NO: 39581 - DNA, 76 bp, Artificial Sequence; identical to SEQ ID NO: 3493
  Description of Artificial Sequence: Synthetic Peanut control sequences; 5' sequence + inner sequence + 3' sequence

SEQ ID NO: 39582 - DNA, 76 bp, Artificial Sequence; identical to SEQ ID NO: 3306
  Description of Artificial Sequence: Synthetic Peanut control sequences; 5' sequence + inner sequence + 3' sequence

SEQ ID NO: 39583 - DNA, 76 bp, Artificial Sequence
  Description of Artificial Sequence: Synthetic Peanut control sequences; 5' sequence + inner sequence + 3' sequence
tagggaagagaaggacatatgatggcctgcgatggatgtggacggtacgcggtttgactagtacatgaccacttga

SEQ ID NO: 39584 - DNA, 76 bp, Artificial Sequence; identical to SEQ ID NO: 3979
  Description of Artificial Sequence: Synthetic Peanut control sequences; 5' sequence + inner sequence + 3' sequence

SEQ ID NO: 39585 - DNA, 76 bp, Artificial Sequence; identical to SEQ ID NO: 7591
  Description of Artificial Sequence: Synthetic Peanut control sequences; 5' sequence + inner sequence + 3' sequence

SEQ ID NO: 39586 - DNA, 76 bp, Artificial Sequence
  Description of Artificial Sequence: Synthetic Peanut control sequences; 5' sequence + inner sequence + 3' sequence
tagggaagagaaggacatatgattggccgctcgaccctatcaagtgcagcatgttgactagtacatgaccacttga

SEQ ID NO: 39587 - DNA, 76 bp, Artificial Sequence; identical to SEQ ID NO: 23874
  Description of Artificial Sequence: Synthetic Peanut control sequences; 5' sequence + inner sequence + 3' sequence

SEQ ID NO: 39588 - DNA, 76 bp, Artificial Sequence; identical to SEQ ID NO: 11910
  Description of Artificial Sequence: Synthetic Peanut control sequences; 5' sequence + inner sequence + 3' sequence

SEQ ID NO: 39589 - DNA, 76 bp, Artificial Sequence; identical to SEQ ID NO: 3484
  Description of Artificial Sequence: Synthetic Peanut control sequences; 5' sequence + inner sequence + 3' sequence

SEQ ID NO: 39590 - DNA, 76 bp, Artificial Sequence; identical to SEQ ID NO: 35433
  Description of Artificial Sequence: Synthetic Peanut control sequences; 5' sequence + inner sequence + 3' sequence

SEQ ID NO: 39591 - DNA, 76 bp, Artificial Sequence; identical to SEQ ID NO: 3138
  Description of Artificial Sequence: Synthetic Peanut control sequences; 5' sequence + inner sequence + 3' sequence

SEQ ID NO: 39592 - DNA, 76 bp, Artificial Sequence; identical to SEQ ID NO: 11564
  Description of Artificial Sequence: Synthetic Peanut control sequences; 5' sequence + inner sequence + 3' sequence

SEQ ID NO: 39593 - DNA, 76 bp, Artificial Sequence; identical to SEQ ID NO: 3631
  Description of Artificial Sequence: Synthetic Peanut control sequences; 5' sequence + inner sequence + 3' sequence

SEQ ID NO: 39594 - DNA, 77 bp, Artificial Sequence; identical to SEQ ID NO: 3659
  Description of Artificial Sequence: Synthetic Peanut control sequences; 5' sequence + inner sequence + 3' sequence

SEQ ID NO: 39595 - DNA, 76 bp, Artificial Sequence; identical to SEQ ID NO: 11782
  Description of Artificial Sequence: Synthetic Peanut control sequences; 5' sequence + inner sequence + 3' sequence

SEQ ID NO: 39596 - DNA, 76 bp, Artificial Sequence; identical to SEQ ID NO: 7651
  Description of Artificial Sequence: Synthetic Peanut control sequences; 5' sequence + inner sequence + 3' sequence

SEQ ID NO: 39597 - DNA, 76 bp, Artificial Sequence; identical to SEQ ID NO: 3442
  Description of Artificial Sequence: Synthetic Peanut control sequences; 5' sequence + inner sequence + 3' sequence

SEQ ID NO: 39598 - DNA, 76 bp, Artificial Sequence; identical to SEQ ID NO: 7837
  Description of Artificial Sequence: Synthetic Peanut control sequences; 5' sequence + inner sequence + 3' sequence

SEQ ID NO: 39599 - DNA, 76 bp, Artificial Sequence; identical to SEQ ID NO: 7280
  Description of Artificial Sequence: Synthetic Peanut control sequences; 5' sequence + inner sequence + 3' sequence

SEQ ID NO: 39600 - DNA, 76 bp, Artificial Sequence; identical to SEQ ID NO: 3141
  Description of Artificial Sequence: Synthetic Peanut control sequences; 5' sequence + inner sequence + 3' sequence

SEQ ID NO: 39601 - DNA, 76 bp, Artificial Sequence; identical to SEQ ID NO: 11850
  Description of Artificial Sequence: Synthetic Peanut control sequences; 5' sequence + inner sequence + 3' sequence

SEQ ID NO: 39602 - DNA, 76 bp, Artificial Sequence
  Description of Artificial Sequence: Synthetic Peanut control sequences; 5' sequence + inner sequence + 3' sequence
tagggaagagaaggacatatgattggccgatcgaccctctcaagtgcagcatgttgactagtacatgaccacttga

SEQ ID NO: 39603 - DNA, 76 bp, Artificial Sequence; identical to SEQ ID NO: 7580
  Description of Artificial Sequence: Synthetic Peanut control sequences; 5' sequence + inner sequence + 3' sequence

SEQ ID NO: 39604 - DNA, 76 bp, Artificial Sequence; identical to SEQ ID NO: 7590
  Description of Artificial Sequence: Synthetic Peanut control sequences; 5' sequence + inner sequence + 3' sequence

SEQ ID NO: 39605 - DNA, 76 bp, Artificial Sequence; identical to SEQ ID NO: 7565
  Description of Artificial Sequence: Synthetic Peanut control sequences; 5' sequence + inner sequence + 3' sequence

SEQ ID NO: 39606 - DNA, 76 bp, Artificial Sequence; identical to SEQ ID NO: 3889
  Description of Artificial Sequence: Synthetic Peanut control sequences; 5' sequence + inner sequence + 3' sequence

SEQ ID NO: 39607 - DNA, 77 bp, Artificial Sequence
  Description of Artificial Sequence: Synthetic Peanut control sequences; 5' sequence + inner sequence + 3' sequence
tagggaagagaaggacatatgatgtgctgcgatggcttagcaaagtgcgacatgttgactagtacatgaccacttga

SEQ ID NO: 39608 - DNA, 76 bp, Artificial Sequence; identical to SEQ ID NO: 3244
  Description of Artificial Sequence: Synthetic Peanut control sequences; 5' sequence + inner sequence + 3' sequence

SEQ ID NO: 39609 - DNA, 76 bp, Artificial Sequence; identical to SEQ ID NO: 3499
  Description of Artificial Sequence: Synthetic Peanut control sequences; 5' sequence + inner sequence + 3' sequence

SEQ ID NO: 39610 - DNA, 76 bp, Artificial Sequence; identical to SEQ ID NO: 15872
  Description of Artificial Sequence: Synthetic Peanut control sequences; 5' sequence + inner sequence + 3' sequence

SEQ ID NO: 39611 - DNA, 76 bp, Artificial Sequence
  Description of Artificial Sequence: Synthetic Peanut control sequences; 5' sequence + inner sequence + 3' sequence
tagggaagagaaggacatatgatgtggccgcagctgacctagcatgtgtgtcattgactagtacatgaccacttga

SEQ ID NO: 39612 - DNA, 76 bp, Artificial Sequence
  Description of Artificial Sequence: Synthetic Peanut control sequences; 5' sequence + inner sequence + 3' sequence
tagggaagagaaggacatatgatgtgcttcacgacctagcacgtggggatggattgactagtacatgaccacttga

SEQ ID NO: 39613 - DNA, 76 bp, Artificial Sequence; identical to SEQ ID NO: 3274
  Description of Artificial Sequence: Synthetic Peanut control sequences; 5' sequence + inner sequence + 3' sequence

SEQ ID NO: 39614 - DNA, 76 bp, Artificial Sequence; identical to SEQ ID NO: 31914
  Description of Artificial Sequence: Synthetic Peanut control sequences; 5' sequence + inner sequence + 3' sequence

SEQ ID NO: 39615 - DNA, 76 bp, Artificial Sequence; identical to SEQ ID NO: 23744
  Description of Artificial Sequence: Synthetic Peanut control sequences; 5' sequence + inner sequence + 3' sequence

SEQ ID NO: 39616 - DNA, 76 bp, Artificial Sequence; identical to SEQ ID NO: 3637
  Description of Artificial Sequence: Synthetic Peanut control sequences; 5' sequence + inner sequence + 3' sequence

SEQ ID NO: 39617 - DNA, 76 bp, Artificial Sequence
  Description of Artificial Sequence: Synthetic Peanut control sequences; 5' sequence + inner sequence + 3' sequence
tagggaagagaaggacatatgatgtcatgcgcggacattcaagttggcgtgtattgactagtacatgaccacttga

SEQ ID NO: 39618 - DNA, 76 bp, Artificial Sequence; identical to SEQ ID NO: 11807
  Description of Artificial Sequence: Synthetic Peanut control sequences; 5' sequence + inner sequence + 3' sequence

SEQ ID NO: 39619 - DNA, 76 bp, Artificial Sequence; identical to SEQ ID NO: 3657
  Description of Artificial Sequence: Synthetic Peanut control sequences; 5' sequence + inner sequence + 3' sequence

SEQ ID NO: 39620 - DNA, 76 bp, Artificial Sequence; identical to SEQ ID NO: 15791
  Description of Artificial Sequence: Synthetic Peanut control sequences; 5' sequence + inner sequence + 3' sequence

SEQ ID NO: 39621 - DNA, 76 bp, Artificial Sequence; identical to SEQ ID NO: 23673
  Description of Artificial Sequence: Synthetic Peanut control sequences; 5' sequence + inner sequence + 3' sequence

SEQ ID NO: 39622 - DNA, 76 bp, Artificial Sequence; identical to SEQ ID NO: 23722
  Description of Artificial Sequence: Synthetic Peanut control sequences; 5' sequence + inner sequence + 3' sequence

SEQ ID NO: 39623 - DNA, 76 bp, Artificial Sequence; identical to SEQ ID NO: 7393
  Description of Artificial Sequence: Synthetic Peanut control sequences; 5' sequence + inner sequence + 3' sequence

SEQ ID NO: 39624 - DNA, 76 bp, Artificial Sequence
  Description of Artificial Sequence: Synthetic Peanut control sequences; 5' sequence + inner sequence + 3' sequence
tagggaagagaaggacatatgatcgtatggcctggacatccctcaagttggcattgactagtacatgaccacttga

SEQ ID NO: 39625 - DNA, 76 bp, Artificial Sequence; identical to SEQ ID NO: 3248
  Description of Artificial Sequence: Synthetic Peanut control sequences; 5' sequence + inner sequence + 3' sequence

SEQ ID NO: 39626 - DNA, 76 bp, Artificial Sequence; identical to SEQ ID NO: 7525
  Description of Artificial Sequence: Synthetic Peanut control sequences; 5' sequence + inner sequence + 3' sequence

SEQ ID NO: 39627 - DNA, 76 bp, Artificial Sequence; identical to SEQ ID NO: 3654
  Description of Artificial Sequence: Synthetic Peanut control sequences; 5' sequence + inner sequence + 3' sequence

SEQ ID NO: 39628 - DNA, 76 bp, Artificial Sequence; identical to SEQ ID NO: 3504
  Description of Artificial Sequence: Synthetic Peanut control sequences; 5' sequence + inner sequence + 3' sequence

SEQ ID NO: 39629 - DNA, 76 bp, Artificial Sequence; identical to SEQ ID NO: 35416
  Description of Artificial Sequence: Synthetic Peanut control sequences; 5' sequence + inner sequence + 3' sequence

SEQ ID NO: 39630 - DNA, 71 bp, Artificial Sequence
  Description of Artificial Sequence: Synthetic Peanut control sequences; 5' sequence + inner sequence + 3' sequence
tagggaagagaaggacatatgatgtactgcactgccctacacgtgggcttgactagtacatgaccacttga

SEQ ID NO: 39631 - DNA, 76 bp, Artificial Sequence; identical to SEQ ID NO: 3932
  Description of Artificial Sequence: Synthetic Peanut control sequences; 5' sequence + inner sequence + 3' sequence

SEQ ID NO: 39632 - DNA, 76 bp, Artificial Sequence; identical to SEQ ID NO: 7870
  Description of Artificial Sequence: Synthetic Peanut control sequences; 5' sequence + inner sequence + 3' sequence

SEQ ID NO: 39633 - DNA, 76 bp, Artificial Sequence; identical to SEQ ID NO: 3830
  Description of Artificial Sequence: Synthetic Peanut control sequences; 5' sequence + inner sequence + 3' sequence

SEQ ID NO: 39634 - DNA, 76 bp, Artificial Sequence
  Description of Artificial Sequence: Synthetic Peanut control sequences; 5' sequence + inner sequence + 3' sequence
tagggaagagaaggacatatgatgtcatgcgctgacattcaagttggcgtggattgactagtacatgaccacttga

SEQ ID NO: 39635 - DNA, 76 bp, Artificial Sequence; identical to SEQ ID NO: 31994
  Description of Artificial Sequence: Synthetic Peanut control sequences; 5' sequence + inner sequence + 3' sequence

SEQ ID NO: 39636 - DNA, 76 bp, Artificial Sequence; identical to SEQ ID NO: 3403
  Description of Artificial Sequence: Synthetic Peanut control sequences; 5' sequence + inner sequence + 3' sequence

SEQ ID NO: 39637 - DNA, 76 bp, Artificial Sequence; identical to SEQ ID NO: 3439
  Description of Artificial Sequence: Synthetic Peanut control sequences; 5' sequence + inner sequence + 3' sequence

SEQ ID NO: 39638 - DNA, 76 bp, Artificial Sequence; identical to SEQ ID NO: 3846
  Description of Artificial Sequence: Synthetic Peanut control sequences; 5' sequence + inner sequence + 3' sequence

SEQ ID NO: 39639 - DNA, 76 bp, Artificial Sequence
  Description of Artificial Sequence: Synthetic Peanut control sequences; 5' sequence + inner sequence + 3' sequence
tagggaagagaaggacatatgattggccgatcgaccctatcaagggcagcatgttgactagtacatgaccacttga

SEQ ID NO: 39640 - DNA, 76 bp, Artificial Sequence; identical to SEQ ID NO: 11871
  Description of Artificial Sequence: Synthetic Peanut control sequences; 5' sequence + inner sequence + 3' sequence

SEQ ID NO: 39641 - DNA, 76 bp, Artificial Sequence; identical to SEQ ID NO: 11876
  Description of Artificial Sequence: Synthetic Peanut control sequences; 5' sequence + inner sequence + 3' sequence

SEQ ID NO: 39642 - DNA, 76 bp, Artificial Sequence
  Description of Artificial Sequence: Synthetic Peanut control sequences; 5' sequence + inner sequence + 3' sequence
tagggaagagaaggacatatgatggacggatcgaacctacaagttgtcgcggattgactagtacatgaccacttga

SEQ ID NO: 39643 - DNA, 76 bp, Artificial Sequence
  Description of Artificial Sequence: Synthetic Peanut control sequences; 5' sequence + inner sequence + 3' sequence
tagggaagagaaggacatatgatccgtaccgaccctatcaagtgctgtccatgttgactagtacatgaccacttga

SEQ ID NO: 39644 - DNA, 76 bp, Artificial Sequence; identical to SEQ ID NO: 23549
  Description of Artificial Sequence: Synthetic Peanut control sequences; 5' sequence + inner sequence + 3' sequence

SEQ ID NO: 39645 - DNA, 76 bp, Artificial Sequence; identical to SEQ ID NO: 15892
  Description of Artificial Sequence: Synthetic Peanut control sequences; 5' sequence + inner sequence + 3' sequence

SEQ ID NO: 39646 - DNA, 78 bp, Artificial Sequence
  Description of Artificial Sequence: Synthetic Peanut control sequences; 5' sequence + inner sequence + 3' sequence
tagggaagagaaggacatatgatcatgtgtcgactcgccctatcatgaggccatgttgactagtacatgaccacttga

SEQ ID NO: 39647 - DNA, 76 bp, Artificial Sequence
  Description of Artificial Sequence: Synthetic Peanut control sequences; 5' sequence + inner sequence + 3' sequence
tagggaagagaaggacatatgatggtccgaacgcacctcatgtgtgtcgtggattgactagtacatgaccacttga

SEQ ID NO: 39648 - DNA, 76 bp, Artificial Sequence; identical to SEQ ID NO: 3633
  Description of Artificial Sequence: Synthetic Peanut control sequences; 5' sequence + inner sequence + 3' sequence

SEQ ID NO: 39649 - DNA, 76 bp, Artificial Sequence; identical to SEQ ID NO: 7494
  Description of Artificial Sequence: Synthetic Peanut control sequences; 5' sequence + inner sequence + 3' sequence

SEQ ID NO: 39650 - DNA, 76 bp, Artificial Sequence; identical to SEQ ID NO: 23289
  Description of Artificial Sequence: Synthetic Peanut control sequences; 5' sequence + inner sequence + 3' sequence

SEQ ID NO: 39651 - DNA, 74 bp, Artificial Sequence
  Description of Artificial Sequence: Synthetic Peanut control sequences; 5' sequence + inner sequence + 3' sequence
tagggaagagaaggacatatgatggcctcgatggatgtggtggtgctgtcattgactagtacatgaccacttga

SEQ ID NO: 39652 - DNA, 79 bp, Artificial Sequence
  Description of Artificial Sequence: Synthetic Peanut control sequences; 5' sequence + inner sequence + 3' sequence
tagggaagagaaggacatatgatccgcatcggaccgatcaaggcaggctgtacgagttgactagtacatgaccacttga

SEQ ID NO: 39653 - DNA, 76 bp, Artificial Sequence
  Description of Artificial Sequence: Synthetic Peanut control sequences; 5' sequence + inner sequence + 3' sequence
tagggaagagaaggacatatgatggccaagctgaccgtcaacgtggttgtggattgactagtacatgaccacttga

SEQ ID NO: 39654 - DNA, 76 bp, Artificial Sequence; identical to SEQ ID NO: 11810
  Description of Artificial Sequence: Synthetic Peanut control sequences; 5' sequence + inner sequence + 3' sequence

SEQ ID NO: 39655 - DNA, 76 bp, Artificial Sequence; identical to SEQ ID NO: 35565
  Description of Artificial Sequence: Synthetic Peanut control sequences; 5' sequence + inner sequence + 3' sequence

SEQ ID NO: 39656 - DNA, 76 bp, Artificial Sequence; identical to SEQ ID NO: 35235
  Description of Artificial Sequence: Synthetic Peanut control sequences; 5' sequence + inner sequence + 3' sequence

SEQ ID NO: 39657 - DNA, 76 bp, Artificial Sequence; identical to SEQ ID NO: 23269
  Description of Artificial Sequence: Synthetic Peanut control sequences; 5' sequence + inner sequence + 3' sequence

SEQ ID NO: 39658 - DNA, 76 bp, Artificial Sequence; identical to SEQ ID NO: 7351
  Description of Artificial Sequence: Synthetic Peanut control sequences; 5' sequence + inner sequence + 3' sequence

SEQ ID NO: 39659 - DNA, 76 bp, Artificial Sequence; identical to SEQ ID NO: 3930
  Description of Artificial Sequence: Synthetic Peanut control sequences; 5' sequence + inner sequence + 3' sequence

SEQ ID NO: 39660 - DNA, 76 bp, Artificial Sequence; identical to SEQ ID NO: 3841
  Description of Artificial Sequence: Synthetic Peanut control sequences; 5' sequence + inner sequence + 3' sequence

SEQ ID NO: 39661 - DNA, 76 bp, Artificial Sequence; identical to SEQ ID NO: 3415
  Description of Artificial Sequence: Synthetic Peanut control sequences; 5' sequence + inner sequence + 3' sequence

SEQ ID NO: 39662 - DNA, 76 bp, Artificial Sequence; identical to SEQ ID NO: 11988
  Description of Artificial Sequence: Synthetic Peanut control sequences; 5' sequence + inner sequence + 3' sequence

SEQ ID NO: 39663 - DNA, 76 bp, Artificial Sequence; identical to SEQ ID NO: 7380
  Description of Artificial Sequence: Synthetic Peanut control sequences; 5' sequence + inner sequence + 3' sequence

SEQ ID NO: 39664 - DNA, 76 bp, Artificial Sequence; identical to SEQ ID NO: 35404
  Description of Artificial Sequence: Synthetic Peanut control sequences; 5' sequence + inner sequence + 3' sequence

SEQ ID NO: 39665 - DNA, 76 bp, Artificial Sequence
  Description of Artificial Sequence: Synthetic Peanut control sequences; 5' sequence + inner sequence + 3' sequence
tagggaagagaaggacatatgatcacgtcagtccggatcggcttagctgggcattgactagtacatgaccacttga

SEQ ID NO: 39666 - DNA, 76 bp, Artificial Sequence; identical to SEQ ID NO: 7445
  Description of Artificial Sequence: Synthetic Peanut control sequences; 5' sequence + inner sequence + 3' sequence

SEQ ID NO: 39667 - DNA, 76 bp, Artificial Sequence; identical to SEQ ID NO: 3881
  Description of Artificial Sequence: Synthetic Peanut control sequences; 5' sequence + inner sequence + 3' sequence

SEQ ID NO: 39668 - DNA, 76 bp, Artificial Sequence; identical to SEQ ID NO: 3190
  Description of Artificial Sequence: Synthetic Peanut control sequences; 5' sequence + inner sequence + 3' sequence

SEQ ID NO: 39669 - DNA, 76 bp, Artificial Sequence; identical to SEQ ID NO: 11928
  Description of Artificial Sequence: Synthetic Peanut control sequences; 5' sequence + inner sequence + 3' sequence

SEQ ID NO: 39670 - DNA, 76 bp, Artificial Sequence; identical to SEQ ID NO: 3471
  Description of Artificial Sequence: Synthetic Peanut control sequences; 5' sequence + inner sequence + 3' sequence

SEQ ID NO: 39671 - DNA, 76 bp, Artificial Sequence; identical to SEQ ID NO: 3172
  Description of Artificial Sequence: Synthetic Peanut control sequences; 5' sequence + inner sequence + 3' sequence

SEQ ID NO: 39672 - DNA, 76 bp, Artificial Sequence; identical to SEQ ID NO: 3988
  Description of Artificial Sequence: Synthetic Peanut control sequences; 5' sequence + inner sequence + 3' sequence

SEQ ID NO: 39673 - DNA, 76 bp, Artificial Sequence; identical to SEQ ID NO: 7988
  Description of Artificial Sequence: Synthetic Peanut control sequences; 5' sequence + inner sequence + 3' sequence

SEQ ID NO: 39674 - DNA, 76 bp, Artificial Sequence; identical to SEQ ID NO: 3424
  Description of Artificial Sequence: Synthetic Peanut control sequences; 5' sequence + inner sequence + 3' sequence

SEQ ID NO: 39675 - DNA, 76 bp, Artificial Sequence; identical to SEQ ID NO: 23286
  Description of Artificial Sequence: Synthetic Peanut control sequences; 5' sequence + inner sequence + 3' sequence

SEQ ID NO: 39676 - DNA, 76 bp, Artificial Sequence; identical to SEQ ID NO: 7905
  Description of Artificial Sequence: Synthetic Peanut control sequences; 5' sequence + inner sequence + 3' sequence

SEQ ID NO: 39677 - DNA, 76 bp, Artificial Sequence
  Description of Artificial Sequence: Synthetic Peanut control sequences; 5' sequence + inner sequence + 3' sequence
tagggaagagaaggacatatgatgtccgagcggacctagcaagtgaggctggattgactagtacatgaccacttga

SEQ ID NO: 39678 - DNA, 76 bp, Artificial Sequence; identical to SEQ ID NO: 7700
  Description of Artificial Sequence: Synthetic Peanut control sequences; 5' sequence + inner sequence + 3' sequence

SEQ ID NO: 39679 - DNA, 76 bp, Artificial Sequence; identical to SEQ ID NO: 3724
  Description of Artificial Sequence: Synthetic Peanut control sequences; 5' sequence + inner sequence + 3' sequence

SEQ ID NO: 39680 - DNA, 76 bp, Artificial Sequence
  Description of Artificial Sequence: Synthetic Peanut control sequences; 5' sequence + inner sequence + 3' sequence
tagggaagagaaggacatatgatgacgttgctgaccgaaagtgcatgtgcgtgttgactagtacatgaccacttga

SEQ ID NO: 39681 - DNA, 76 bp, Artificial Sequence; identical to SEQ ID NO: 15933
  Description of Artificial Sequence: Synthetic Peanut control sequences; 5' sequence + inner sequence + 3' sequence

SEQ ID NO: 39682 - DNA, 76 bp, Artificial Sequence; identical to SEQ ID NO: 23343
  Description of Artificial Sequence: Synthetic Peanut control sequences; 5' sequence + inner sequence + 3' sequence

SEQ ID NO: 39683 - DNA, 76 bp, Artificial Sequence; identical to SEQ ID NO: 7575
  Description of Artificial Sequence: Synthetic Peanut control sequences; 5' sequence + inner sequence + 3' sequence

SEQ ID NO: 39684 - DNA, 76 bp, Artificial Sequence; identical to SEQ ID NO: 7611
  Description of Artificial Sequence: Synthetic Peanut control sequences; 5' sequence + inner sequence + 3' sequence

SEQ ID NO: 39685 - DNA, 76 bp, Artificial Sequence; identical to SEQ ID NO: 11633
  Description of Artificial Sequence: Synthetic Peanut control sequences; 5' sequence + inner sequence + 3' sequence

SEQ ID NO: 39686 - DNA, 77 bp, Artificial Sequence
  Description of Artificial Sequence: Synthetic Peanut control sequences; 5' sequence + inner sequence + 3' sequence
tagggaagagaaggacatatgatggcctgcgatggcttagcaaagtgcgacatgttgactagtacatgaccacttga

SEQ ID NO: 39687 - DNA, 76 bp, Artificial Sequence
  Description of Artificial Sequence: Synthetic Peanut control sequences; 5' sequence + inner sequence + 3' sequence
tagggaagagaaggacatatgattggccgatctaccctatcaagtgcagcatgttgactagtacatgaccacttga

SEQ ID NO: 39688 - DNA, 76 bp, Artificial Sequence
  Description of Artificial Sequence: Synthetic Peanut control sequences; 5' sequence + inner sequence + 3' sequence
tagggaagagaaggacatatgatcgtgtggccgtcgacatccctcgagtgtcattgactagtacatgaccacttga

SEQ ID NO: 39689 - DNA, 76 bp, Artificial Sequence; identical to SEQ ID NO: 7406
  Description of Artificial Sequence: Synthetic Peanut control sequences; 5' sequence + inner sequence + 3' sequence

SEQ ID NO: 39690 - DNA, 76 bp, Artificial Sequence; identical to SEQ ID NO: 31295
  Description of Artificial Sequence: Synthetic Peanut control sequences; 5' sequence + inner sequence + 3' sequence

SEQ ID NO: 39691 - DNA, 76 bp, Artificial Sequence; identical to SEQ ID NO: 3214
  Description of Artificial Sequence: Synthetic Peanut control sequences; 5' sequence + inner sequence + 3' sequence

SEQ ID NO: 39692 - DNA, 76 bp, Artificial Sequence; identical to SEQ ID NO: 11792
  Description of Artificial Sequence: Synthetic Peanut control sequences; 5' sequence + inner sequence + 3' sequence

SEQ ID NO: 39693 - DNA, 76 bp, Artificial Sequence; identical to SEQ ID NO: 7799
  Description of Artificial Sequence: Synthetic Peanut control sequences; 5' sequence + inner sequence + 3' sequence

SEQ ID NO: 39694 - DNA, 76 bp, Artificial Sequence; identical to SEQ ID NO: 3761
  Description of Artificial Sequence: Synthetic Peanut control sequences; 5' sequence + inner sequence + 3' sequence

SEQ ID NO: 39695 - DNA, 76 bp, Artificial Sequence; identical to SEQ ID NO: 7890
  Description of Artificial Sequence: Synthetic Peanut control sequences; 5' sequence + inner sequence + 3' sequence

SEQ ID NO: 39696 - DNA, 76 bp, Artificial Sequence; identical to SEQ ID NO: 23295
  Description of Artificial Sequence: Synthetic Peanut control sequences; 5' sequence + inner sequence + 3' sequence

SEQ ID NO: 39697 - DNA, 76 bp, Artificial Sequence; identical to SEQ ID NO: 7691
  Description of Artificial Sequence: Synthetic Peanut control sequences; 5' sequence + inner sequence + 3' sequence

SEQ ID NO: 39698 - DNA, 75 bp, Artificial Sequence; identical to SEQ ID NO: 15918
  Description of Artificial Sequence: Synthetic Peanut control sequences; 5' sequence + inner sequence + 3' sequence

SEQ ID NO: 39699 - DNA, 78 bp, Artificial Sequence
  Description of Artificial Sequence: Synthetic Peanut control sequences; 5' sequence + inner sequence + 3' sequence
tagggaagagaaggacatatgatggacgcacgcagaccttcaagtgtgccgtggattgactagtacatgaccacttga

SEQ ID NO: 39700 - DNA, 76 bp, Artificial Sequence; identical to SEQ ID NO: 3361
  Description of Artificial Sequence: Synthetic Peanut control sequences; 5' sequence + inner sequence + 3' sequence

SEQ ID NO: 39701 - DNA, 76 bp, Artificial Sequence; identical to SEQ ID NO: 7706
  Description of Artificial Sequence: Synthetic Peanut control sequences; 5' sequence + inner sequence + 3' sequence

SEQ ID NO: 39702 - DNA, 76 bp, Artificial Sequence
  Description of Artificial Sequence: Synthetic Peanut control sequences; 5' sequence + inner sequence + 3' sequence
tagggaagagaaggacatatgatccgcgtcaacctatcaagcgcatggacgtattgactagtacatgaccacttga

SEQ ID NO: 39703 - DNA, 76 bp, Artificial Sequence; identical to SEQ ID NO: 3167
  Description of Artificial Sequence: Synthetic Peanut control sequences; 5' sequence + inner sequence + 3' sequence

SEQ ID NO: 39704 - DNA, 76 bp, Artificial Sequence; identical to SEQ ID NO: 23789
  Description of Artificial Sequence: Synthetic Peanut control sequences; 5' sequence + inner sequence + 3' sequence

SEQ ID NO: 39705 - DNA, 76 bp, Artificial Sequence; identical to SEQ ID NO: 35166
  Description of Artificial Sequence: Synthetic Peanut control sequences; 5' sequence + inner sequence + 3' sequence

SEQ ID NO: 39706 - DNA, 76 bp, Artificial Sequence; identical to SEQ ID NO: 3498
  Description of Artificial Sequence: Synthetic Peanut control sequences; 5' sequence + inner sequence + 3' sequence

SEQ ID NO: 39707 - DNA, 76 bp, Artificial Sequence; identical to SEQ ID NO: 3919
  Description of Artificial Sequence: Synthetic Peanut control sequences; 5' sequence + inner sequence + 3' sequence

SEQ ID NO: 39708 - DNA, 72 bp, Artificial Sequence; identical to SEQ ID NO: 3893
  Description of Artificial Sequence: Synthetic Peanut control sequences; 5' sequence + inner sequence + 3' sequence

SEQ ID NO: 39709 - DNA, 76 bp, Artificial Sequence
  Description of Artificial Sequence: Synthetic Peanut control sequences; 5' sequence + inner sequence + 3' sequence
tagggaagagaaggacatatgatgtcatggctcgtccctgatcacgtggctcattgactagtacatgaccacttga

SEQ ID NO: 39710 - DNA, 76 bp, Artificial Sequence; identical to SEQ ID NO: 3946
  Description of Artificial Sequence: Synthetic Peanut control sequences; 5' sequence + inner sequence + 3' sequence

SEQ ID NO: 39711 - DNA, 76 bp, Artificial Sequence; identical to SEQ ID NO: 11659
  Description of Artificial Sequence: Synthetic Peanut control sequences; 5' sequence + inner sequence + 3' sequence

SEQ ID NO: 39712 - DNA, 76 bp, Artificial Sequence; identical to SEQ ID NO: 3380
  Description of Artificial Sequence: Synthetic Peanut control sequences; 5' sequence + inner sequence + 3' sequence

SEQ ID NO: 39713 - DNA, 76 bp, Artificial Sequence; identical to SEQ ID NO: 23617
  Description of Artificial Sequence: Synthetic Peanut control sequences; 5' sequence + inner sequence + 3' sequence

SEQ ID NO: 39714 - DNA, 76 bp, Artificial Sequence; identical to SEQ ID NO: 7451
  Description of Artificial Sequence: Synthetic Peanut control sequences; 5' sequence + inner sequence + 3' sequence

SEQ ID NO: 39715 - DNA, 76 bp, Artificial Sequence; identical to SEQ ID NO: 7816
  Description of Artificial Sequence: Synthetic Peanut control sequences; 5' sequence + inner sequence + 3' sequence

SEQ ID NO: 39716 - DNA, 76 bp, Artificial Sequence; identical to SEQ ID NO: 3955
  Description of Artificial Sequence: Synthetic Peanut control sequences; 5' sequence + inner sequence + 3' sequence

SEQ ID NO: 39717 - DNA, 76 bp, Artificial Sequence; identical to SEQ ID NO: 3178
  Description of Artificial Sequence: Synthetic Peanut control sequences; 5' sequence + inner sequence + 3' sequence

SEQ ID NO: 39718 - DNA, 76 bp, Artificial Sequence
  Description of Artificial Sequence: Synthetic Peanut control sequences; 5' sequence + inner sequence + 3' sequence
tagggaagagaaggacatatgatggccgaacacgaccgcaagtgcgttatggattgactagtacatgaccacttga

SEQ ID NO: 39719 - DNA, 76 bp, Artificial Sequence; identical to SEQ ID NO: 7260
  Description of Artificial Sequence: Synthetic Peanut control sequences; 5' sequence + inner sequence + 3' sequence

SEQ ID NO: 39720 - DNA, 76 bp, Artificial Sequence; identical to SEQ ID NO: 23468
  Description of Artificial Sequence: Synthetic Peanut control sequences; 5' sequence + inner sequence + 3' sequence

SEQ ID NO: 39721 - DNA, 76 bp, Artificial Sequence
  Description of Artificial Sequence: Synthetic Peanut control sequences; 5' sequence + inner sequence + 3' sequence
tagggaagagaaggacatatgatgacgccactcatgccctatcgatgtggccattgactagtacatgaccacttga

SEQ ID NO: 39722 - DNA, 76 bp, Artificial Sequence
  Description of Artificial Sequence: Synthetic Peanut control sequences; 5' sequence + inner sequence + 3' sequence
tagggaagagaaggacatatgatggccaatcgagccgatcaagtgtcgatggattgactagtacatgaccacttga

SEQ ID NO: 39723 - DNA, 76 bp, Artificial Sequence; identical to SEQ ID NO: 3755
  Description of Artificial Sequence: Synthetic Peanut control sequences; 5' sequence + inner sequence + 3' sequence

SEQ ID NO: 39724 - DNA, 76 bp, Artificial Sequence
  Description of Artificial Sequence: Synthetic Peanut control sequences; 5' sequence + inner sequence + 3' sequence
tagggaagagaaggacatatgattggccgatcgaccctatcaagtgcatcatgttgactagtacatgaccacttga

SEQ ID NO: 39725 - DNA, 76 bp, Artificial Sequence; identical to SEQ ID NO: 11618
  Description of Artificial Sequence: Synthetic Peanut control sequences; 5' sequence + inner sequence + 3' sequence

SEQ ID NO: 39726 - DNA, 76 bp, Artificial Sequence; identical to SEQ ID NO: 7610
  Description of Artificial Sequence: Synthetic Peanut control sequences; 5' sequence + inner sequence + 3' sequence

SEQ ID NO: 39727 - DNA, 76 bp, Artificial Sequence; identical to SEQ ID NO: 7735
  Description of Artificial Sequence: Synthetic Peanut control sequences; 5' sequence + inner sequence + 3' sequence

SEQ ID NO: 39728 - DNA, 76 bp, Artificial Sequence; identical to SEQ ID NO: 7898
  Description of Artificial Sequence: Synthetic Peanut control sequences; 5' sequence + inner sequence + 3' sequence

SEQ ID NO: 39729 - DNA, 76 bp, Artificial Sequence; identical to SEQ ID NO: 7907
  Description of Artificial Sequence: Synthetic Peanut control sequences; 5' sequence + inner sequence + 3' sequence

SEQ ID NO: 39730 - DNA, 76 bp, Artificial Sequence; identical to SEQ ID NO: 7638
  Description of Artificial Sequence: Synthetic Peanut control sequences; 5' sequence + inner sequence + 3' sequence

SEQ ID NO: 39731 - DNA, 76 bp, Artificial Sequence; identical to SEQ ID NO: 3371
  Description of Artificial Sequence: Synthetic Peanut control sequences; 5' sequence + inner sequence + 3' sequence

SEQ ID NO: 39732 - DNA, 76 bp, Artificial Sequence; identical to SEQ ID NO: 3945
  Description of Artificial Sequence: Synthetic Peanut control sequences; 5' sequence + inner sequence + 3' sequence

SEQ ID NO: 39733 - DNA, 73 bp, Artificial Sequence; identical to SEQ ID NO: 27993
  Description of Artificial Sequence: Synthetic Peanut control sequences; 5' sequence + inner sequence + 3' sequence

SEQ ID NO: 39734 - DNA, 76 bp, Artificial Sequence; identical to SEQ ID NO: 7597
  Description of Artificial Sequence: Synthetic Peanut control sequences; 5' sequence + inner sequence + 3' sequence

SEQ ID NO: 39735 - DNA, 76 bp, Artificial Sequence; identical to SEQ ID NO: 15744
  Description of Artificial Sequence: Synthetic Peanut control sequences; 5' sequence + inner sequence + 3' sequence

SEQ ID NO: 39736 - DNA, 76 bp, Artificial Sequence
  Description of Artificial Sequence: Synthetic Peanut control sequences; 5' sequence + inner sequence + 3' sequence
tagggaagagaaggacatatgatggcctgatcgaacctatcaagtgcagcatgttgactagtacatgaccacttga

SEQ ID NO: 39737 - DNA, 76 bp, Artificial Sequence; identical to SEQ ID NO: 7499
  Description of Artificial Sequence: Synthetic Peanut control sequences; 5' sequence + inner sequence + 3' sequence

SEQ ID NO: 39738 - DNA, 76 bp, Artificial Sequence; identical to SEQ ID NO: 11877
  Description of Artificial Sequence: Synthetic Peanut control sequences; 5' sequence + inner sequence + 3' sequence

SEQ ID NO: 39739 - DNA, 76 bp, Artificial Sequence; identical to SEQ ID NO: 3666
  Description of Artificial Sequence: Synthetic Peanut control sequences; 5' sequence + inner sequence + 3' sequence

SEQ ID NO: 39740 - DNA, 76 bp, Artificial Sequence; identical to SEQ ID NO: 15618
  Description of Artificial Sequence: Synthetic Peanut control sequences; 5' sequence + inner sequence + 3' sequence

SEQ ID NO: 39741 - DNA, 76 bp, Artificial Sequence; identical to SEQ ID NO: 3911
  Description of Artificial Sequence: Synthetic Peanut control sequences; 5' sequence + inner sequence + 3' sequence

SEQ ID NO: 39742 - DNA, 73 bp, Artificial Sequence; identical to SEQ ID NO: 27902
  Description of Artificial Sequence: Synthetic Peanut control sequences; 5' sequence + inner sequence + 3' sequence

SEQ ID NO: 39743 - DNA, 75 bp, Artificial Sequence
  Description of Artificial Sequence: Synthetic Peanut control sequences; 5' sequence + inner sequence + 3' sequence
tagggaagagaaggacatatgatgtgccgcagctgacctagcatgtgtgtcattgactagtacatgaccacttga

SEQ ID NO: 39744 - DNA, 76 bp, Artificial Sequence; identical to SEQ ID NO: 3231
  Description of Artificial Sequence: Synthetic Peanut control sequences; 5' sequence + inner sequence + 3' sequence

SEQ ID NO: 39745 - DNA, 76 bp, Artificial Sequence
  Description of Artificial Sequence: Synthetic Peanut control sequences; 5' sequence + inner sequence + 3' sequence
tagggaagagaaggacatatgatgtgcgcgctgttccctctacgtgcggcatgttgactagtacatgaccacttga

SEQ ID NO: 39746 - DNA, 76 bp, Artificial Sequence; identical to SEQ ID NO: 27801
  Description of Artificial Sequence: Synthetic Peanut control sequences; 5' sequence + inner sequence + 3' sequence

SEQ ID NO: 39747 - DNA, 76 bp, Artificial Sequence; identical to SEQ ID NO: 3324
  Description of Artificial Sequence: Synthetic Peanut control sequences; 5' sequence + inner sequence + 3' sequence

SEQ ID NO: 39748 - DNA, 76 bp, Artificial Sequence; identical to SEQ ID NO: 7653
  Description of Artificial Sequence: Synthetic Peanut control sequences; 5' sequence + inner sequence + 3' sequence

SEQ ID NO: 39749 - DNA, 76 bp, Artificial Sequence; identical to SEQ ID NO: 3763
  Description of Artificial Sequence: Synthetic Peanut control sequences; 5' sequence + inner sequence + 3' sequence

SEQ ID NO: 39750 - DNA, 76 bp, Artificial Sequence; identical to SEQ ID NO: 3720
  Description of Artificial Sequence: Synthetic Peanut control sequences; 5' sequence + inner sequence + 3' sequence

SEQ ID NO: 39751 - DNA, 76 bp, Artificial Sequence; identical to SEQ ID NO: 3869
  Description of Artificial Sequence: Synthetic Peanut control sequences; 5' sequence + inner sequence + 3' sequence

SEQ ID NO: 39752 - DNA, 81 bp, Artificial Sequence
  Description of Artificial Sequence: Synthetic Peanut control sequences; 5' sequence + inner sequence + 3' sequence
tagggaagagaaggacatatgatgcattggacgatcgtgccctacacgtgggtatggattgactagtacatgaccacttga

SEQ ID NO: 39753 - DNA, 76 bp, Artificial Sequence; identical to SEQ ID NO: 3056
  Description of Artificial Sequence: Synthetic Peanut control sequences; 5' sequence + inner sequence + 3' sequence

SEQ ID NO: 39754 - DNA, 76 bp, Artificial Sequence; identical to SEQ ID NO: 7504
  Description of Artificial Sequence: Synthetic Peanut control sequences; 5' sequence + inner sequence + 3' sequence

SEQ ID NO: 39755 - DNA, 76 bp, Artificial Sequence; identical to SEQ ID NO: 35010
  Description of Artificial Sequence: Synthetic Peanut control sequences; 5' sequence + inner sequence + 3' sequence

SEQ ID NO: 39756 - DNA, 76 bp, Artificial Sequence; identical to SEQ ID NO: 3860
  Description of Artificial Sequence: Synthetic Peanut control sequences; 5' sequence + inner sequence + 3' sequence

SEQ ID NO: 39757 - DNA, 76 bp, Artificial Sequence; identical to SEQ ID NO: 35783
  Description of Artificial Sequence: Synthetic Peanut control sequences; 5' sequence + inner sequence + 3' sequence

SEQ ID NO: 39758 - DNA, 76 bp, Artificial Sequence; identical to SEQ ID NO: 31452
  Description of Artificial Sequence: Synthetic Peanut control sequences; 5' sequence + inner sequence + 3' sequence

SEQ ID NO: 39759 - DNA, 76 bp, Artificial Sequence
  Description of Artificial Sequence: Synthetic Peanut control sequences; 5' sequence + inner sequence + 3' sequence
tagggaagagaaggacatatgattggcatgtgtgcggattcgtcccttggtcattgactagtacatgaccacttga

SEQ ID NO: 39760 - DNA, 76 bp, Artificial Sequence; identical to SEQ ID NO: 23385
  Description of Artificial Sequence: Synthetic Peanut control sequences; 5' sequence + inner sequence + 3' sequence

SEQ ID NO: 39761 - DNA, 76 bp, Artificial Sequence; identical to SEQ ID NO: 3940
  Description of Artificial Sequence: Synthetic Peanut control sequences; 5' sequence + inner sequence + 3' sequence

SEQ ID NO: 39762 - DNA, 76 bp, Artificial Sequence
  Description of Artificial Sequence: Synthetic Peanut control sequences; 5' sequence + inner sequence + 3' sequence
tagggaagagaaggacatatgatccgatcgacctcggtgcgtcagggcttgacttgactagtacatgaccacttga

SEQ ID NO: 39763 - DNA, 76 bp, Artificial Sequence
  Description of Artificial Sequence: Synthetic Peanut control sequences; 5' sequence + inner sequence + 3' sequence
tagggaagagaaggacatatgattggccgatcgaccctatcaattgcagcatgttgactagtacatgaccacttga

SEQ ID NO: 39764 - DNA, 76 bp, Artificial Sequence; identical to SEQ ID NO: 3635
  Description of Artificial Sequence: Synthetic Peanut control sequences; 5' sequence + inner sequence + 3' sequence

SEQ ID NO: 39765 - DNA, 76 bp, Artificial Sequence; identical to SEQ ID NO: 11458
  Description of Artificial Sequence: Synthetic Peanut control sequences; 5' sequence + inner sequence + 3' sequence

SEQ ID NO: 39766 - DNA, 76 bp, Artificial Sequence; identical to SEQ ID NO: 7420
  Description of Artificial Sequence: Synthetic Peanut control sequences; 5' sequence + inner sequence + 3' sequence

SEQ ID NO: 39767 - DNA, 73 bp, Artificial Sequence
  Description of Artificial Sequence: Synthetic Peanut control sequences; 5' sequence + inner sequence + 3' sequence
tagggaagagaaggacatatgatgtgcgacctgacctagcatgtgtgtcattgactagtacatgaccacttga

SEQ ID NO: 39768 - DNA, 76 bp, Artificial Sequence
  Description of Artificial Sequence: Synthetic Peanut control sequences; 5' sequence + inner sequence + 3' sequence
tagggaagagaaggacatatgatgtcatgccatcccttcgagtgtgtcacgtattgactagtacatgaccacttga

SEQ ID NO: 39769 - DNA, 76 bp, Artificial Sequence
  Description of Artificial Sequence: Synthetic Peanut control sequences; 5' sequence + inner sequence + 3' sequence
tagggaagagaaggacatatgatgtctcgcgtgccctatcatgtgtgcgtggattgactagtacatgaccacttga

SEQ ID NO: 39770 - DNA, 76 bp, Artificial Sequence; identical to SEQ ID NO: 3114
  Description of Artificial Sequence: Synthetic Peanut control sequences; 5' sequence + inner sequence + 3' sequence

SEQ ID NO: 39771 - DNA, 76 bp, Artificial Sequence; identical to SEQ ID NO: 15612
  Description of Artificial Sequence: Synthetic Peanut control sequences; 5' sequence + inner sequence + 3' sequence

SEQ ID NO: 39772 - DNA, 76 bp, Artificial Sequence; identical to SEQ ID NO: 7613
  Description of Artificial Sequence: Synthetic Peanut control sequences; 5' sequence + inner sequence + 3' sequence

SEQ ID NO: 39773 - DNA, 76 bp, Artificial Sequence; identical to SEQ ID NO: 7785
  Description of Artificial Sequence: Synthetic Peanut control sequences; 5' sequence + inner sequence + 3' sequence

SEQ ID NO: 39774 - DNA, 76 bp, Artificial Sequence; identical to SEQ ID NO: 23506
  Description of Artificial Sequence: Synthetic Peanut control sequences; 5' sequence + inner sequence + 3' sequence

SEQ ID NO: 39775 - DNA, 76 bp, Artificial Sequence; identical to SEQ ID NO: 31989
  Description of Artificial Sequence: Synthetic Peanut control sequences; 5' sequence + inner sequence + 3' sequence

SEQ ID NO: 39776 - DNA, 75 bp, Artificial Sequence; identical to SEQ ID NO: 3975
  Description of Artificial Sequence: Synthetic Peanut control sequences; 5' sequence + inner sequence + 3' sequence

SEQ ID NO: 39777 - DNA, 76 bp, Artificial Sequence
  Description of Artificial Sequence: Synthetic Peanut control sequences; 5' sequence + inner sequence + 3' sequence
tagggaagagaaggacatatgatgcgtcatgtgtccagtccctcaagttgtcattgactagtacatgaccacttga

SEQ ID NO: 39778 - DNA, 76 bp, Artificial Sequence
  Description of Artificial Sequence: Synthetic Peanut control sequences; 5' sequence + inner sequence + 3' sequence
tagggaagagaaggacatatgatccgtctcaaccgtcgtggtctggatgcgtcttgactagtacatgaccacttga

SEQ ID NO: 39779 - DNA, 76 bp, Artificial Sequence; identical to SEQ ID NO: 31441
  Description of Artificial Sequence: Synthetic Peanut control sequences; 5' sequence + inner sequence + 3' sequence

SEQ ID NO: 39780 - DNA, 76 bp, Artificial Sequence; identical to SEQ ID NO: 3291
  Description of Artificial Sequence: Synthetic Peanut control sequences; 5' sequence + inner sequence + 3' sequence

SEQ ID NO: 39781 - DNA, 76 bp, Artificial Sequence; identical to SEQ ID NO: 27810
  Description of Artificial Sequence: Synthetic Peanut control sequences; 5' sequence + inner sequence + 3' sequence

SEQ ID NO: 39782 - DNA, 76 bp, Artificial Sequence; identical to SEQ ID NO: 3086
  Description of Artificial Sequence: Synthetic Peanut control sequences; 5' sequence + inner sequence + 3' sequence

SEQ ID NO: 39783 - DNA, 76 bp, Artificial Sequence; identical to SEQ ID NO: 31947
  Description of Artificial Sequence: Synthetic Peanut control sequences; 5' sequence + inner sequence + 3' sequence

SEQ ID NO: 39784 - DNA, 76 bp, Artificial Sequence
  Description of Artificial Sequence: Synthetic Peanut control sequences; 5' sequence + inner sequence + 3' sequence
tagggaagagaaggacatatgattggccgatcgaccatatcaagtgcagcatgttgactagtacatgaccacttga

SEQ ID NO: 39785 - DNA, 76 bp, Artificial Sequence; identical to SEQ ID NO: 11769
  Description of Artificial Sequence: Synthetic Peanut control sequences; 5' sequence + inner sequence + 3' sequence

SEQ ID NO: 39786 - DNA, 75 bp, Artificial Sequence
  Description of Artificial Sequence: Synthetic Peanut control sequences; 5' sequence + inner sequence + 3' sequence
tagggaagagaaggacatatgatggccgaacgaccctatcaagtgcagcatgttgactagtacatgaccacttga

SEQ ID NO: 39787 - DNA, 76 bp, Artificial Sequence; identical to SEQ ID NO: 3678
  Description of Artificial Sequence: Synthetic Peanut control sequences; 5' sequence + inner sequence + 3' sequence

SEQ ID NO: 39788 - DNA, 76 bp, Artificial Sequence; identical to SEQ ID NO: 23496
  Description of Artificial Sequence: Synthetic Peanut control sequences; 5' sequence + inner sequence + 3' sequence

SEQ ID NO: 39789 - DNA, 75 bp, Artificial Sequence
  Description of Artificial Sequence: Synthetic Peanut control sequences; 5' sequence + inner sequence + 3' sequence
tagggaagagaaggacatatgatggcacaaacggaccgacaagtgcagcatgttgactagtacatgaccacttga

SEQ ID NO: 39790 - DNA, 76 bp, Artificial Sequence
  Description of Artificial Sequence: Synthetic Peanut control sequences; 5' sequence + inner sequence + 3' sequence
tagggaagagaaggacatatgatgtgcgtatcggcccggtcaagttcggcatgttgactagtacatgaccacttga

SEQ ID NO: 39791 - DNA, 74 bp, Artificial Sequence
  Description of Artificial Sequence: Synthetic Peanut control sequences; 5' sequence + inner sequence + 3' sequence
tagggaagagaaggacatatgatccgtaccgaccctatcaagtgcagcatgttgactagtacatgaccacttga

SEQ ID NO: 39792 - DNA, 74 bp, Artificial Sequence
  Description of Artificial Sequence: Synthetic Peanut control sequences; 5' sequence + inner sequence + 3' sequence
tagggaagagaaggacatatgatggccgcagctgacctagcatgtgtgtcattgactagtacatgaccacttga

SEQ ID NO: 39793 - DNA, 76 bp, Artificial Sequence; identical to SEQ ID NO: 35023
  Description of Artificial Sequence: Synthetic Peanut control sequences; 5' sequence + inner sequence + 3' sequence

SEQ ID NO: 39794 - DNA, 76 bp, Artificial Sequence
  Description of Artificial Sequence: Synthetic Peanut control sequences; 5' sequence + inner sequence + 3' sequence
tagggaagagaaggacatatgatgtcgcgatactgaccttcgagtgcgtgatgttgactagtacatgaccacttga

SEQ ID NO: 39795 - DNA, 76 bp, Artificial Sequence; identical to SEQ ID NO: 11579
  Description of Artificial Sequence: Synthetic Peanut control sequences; 5' sequence + inner sequence + 3' sequence

SEQ ID NO: 39796 - DNA, 76 bp, Artificial Sequence; identical to SEQ ID NO: 11949
  Description of Artificial Sequence: Synthetic Peanut control sequences; 5' sequence + inner sequence + 3' sequence

SEQ ID NO: 39797 - DNA, 76 bp, Artificial Sequence
  Description of Artificial Sequence: Synthetic Peanut control sequences; 5' sequence + inner sequence + 3' sequence
tagggaagagaaggacatatgatgcacgactcgcaccctatcatggggccatgttgactagtacatgaccacttga

SEQ ID NO: 39798 - DNA, 76 bp, Artificial Sequence
  Description of Artificial Sequence: Synthetic Peanut control sequences; 5' sequence + inner sequence + 3' sequence
tagggaagagaaggacatatgatggaccgagcttacgtacgagtgggtgtggattgactagtacatgaccacttga

SEQ ID NO: 39799 - DNA, 76 bp, Artificial Sequence
  Description of Artificial Sequence: Synthetic Peanut control sequences; 5' sequence + inner sequence + 3' sequence
tagggaagagaaggacatatgatccgactcgccctacatgtgggtacgtcgtgttgactagtacatgaccacttga

SEQ ID NO: 39800 - DNA, 76 bp, Artificial Sequence
  Description of Artificial Sequence: Synthetic Peanut control sequences; 5' sequence + inner sequence + 3' sequence
tagggaagagaaggacatatgatgtcacgagcgtaccgtcatggggtgatggattgactagtacatgaccacttga

SEQ ID NO: 39801 - DNA, 76 bp, Artificial Sequence; identical to SEQ ID NO: 3863
  Description of Artificial Sequence: Synthetic Peanut control sequences; 5' sequence + inner sequence + 3' sequence

SEQ ID NO: 39802 - DNA, 76 bp, Artificial Sequence; identical to SEQ ID NO: 3256
  Description of Artificial Sequence: Synthetic Peanut control sequences; 5' sequence + inner sequence + 3' sequence

SEQ ID NO: 39803 - DNA, 76 bp, Artificial Sequence; identical to SEQ ID NO: 3601
  Description of Artificial Sequence: Synthetic Peanut control sequences; 5' sequence + inner sequence + 3' sequence

SEQ ID NO: 39804 - DNA, 76 bp, Artificial Sequence
  Description of Artificial Sequence: Synthetic Peanut control sequences; 5' sequence + inner sequence + 3' sequence
tagggaagagaaggacatatgatcatgtggccactatgccctatcatgcggtcttgactagtacatgaccacttga

SEQ ID NO: 39805 - DNA, 76 bp, Artificial Sequence
  Description of Artificial Sequence: Synthetic Peanut control sequences; 5' sequence + inner sequence + 3' sequence
tagggaagagaaggacatatgatgtgctgcactgccctacacgtgggtatggattgactagtacatgaccacttga

SEQ ID NO: 39806 - DNA, 76 bp, Artificial Sequence
  Description of Artificial Sequence: Synthetic Peanut control sequences; 5' sequence + inner sequence + 3' sequence
tagggaagagaaggacatatgatttgccgatcgaccctatcaagtgcagcatgttgactagtacatgaccacttga

SEQ ID NO: 39807 - DNA, 76 bp, Artificial Sequence; identical to SEQ ID NO: 15821
  Description of Artificial Sequence: Synthetic Peanut control sequences; 5' sequence + inner sequence + 3' sequence

SEQ ID NO: 39808 - DNA, 76 bp, Artificial Sequence; identical to SEQ ID NO: 23478
  Description of Artificial Sequence: Synthetic Peanut control sequences; 5' sequence + inner sequence + 3' sequence

SEQ ID NO: 39809 - DNA, 76 bp, Artificial Sequence; identical to SEQ ID NO: 3953
  Description of Artificial Sequence: Synthetic Peanut control sequences; 5' sequence + inner sequence + 3' sequence

SEQ ID NO: 39810 - DNA, 76 bp, Artificial Sequence; identical to SEQ ID NO: 11964
  Description of Artificial Sequence: Synthetic Peanut control sequences; 5' sequence + inner sequence + 3' sequence

SEQ ID NO: 39811 - DNA, 76 bp, Artificial Sequence; identical to SEQ ID NO: 3937
  Description of Artificial Sequence: Synthetic Peanut control sequences; 5' sequence + inner sequence + 3' sequence

SEQ ID NO: 39812 - DNA, 76 bp, Artificial Sequence; identical to SEQ ID NO: 7979
  Description of Artificial Sequence: Synthetic Peanut control sequences; 5' sequence + inner sequence + 3' sequence

SEQ ID NO: 39813 - DNA, 76 bp, Artificial Sequence; identical to SEQ ID NO: 3703
  Description of Artificial Sequence: Synthetic Peanut control sequences; 5' sequence + inner sequence + 3' sequence

SEQ ID NO: 39814 - DNA, 76 bp, Artificial Sequence
  Description of Artificial Sequence: Synthetic Peanut control sequences; 5' sequence + inner sequence + 3' sequence
tagggaagagaaggacatatgattggccgcactgaccgttcaagtgtcgtggattgactagtacatgaccacttga

SEQ ID NO: 39815 - DNA, 76 bp, Artificial Sequence; identical to SEQ ID NO: 23312
  Description of Artificial Sequence: Synthetic Peanut control sequences; 5' sequence + inner sequence + 3' sequence

SEQ ID NO: 39816 - DNA, 76 bp, Artificial Sequence; identical to SEQ ID NO: 7823
  Description of Artificial Sequence: Synthetic Peanut control sequences; 5' sequence + inner sequence + 3' sequence

SEQ ID NO: 39817 - DNA, 76 bp, Artificial Sequence; identical to SEQ ID NO: 3137
  Description of Artificial Sequence: Synthetic Peanut control sequences; 5' sequence + inner sequence + 3' sequence

SEQ ID NO: 39818 - DNA, 76 bp, Artificial Sequence; identical to SEQ ID NO: 3644
  Description of Artificial Sequence: Synthetic Peanut control sequences; 5' sequence + inner sequence + 3' sequence

SEQ ID NO: 39819 - DNA, 76 bp, Artificial Sequence
  Description of Artificial Sequence: Synthetic Peanut control sequences; 5' sequence + inner sequence + 3' sequence
tagggaagagaaggacatatgattggacgatcgaccctatcaagtgcagcatgttgactagtacatgaccacttga

SEQ ID NO: 39820 - DNA, 76 bp, Artificial Sequence
  Description of Artificial Sequence: Synthetic Peanut control sequences; 5' sequence + inner sequence + 3' sequence
tagggaagagaaggacatatgattggccgatcgatcctatcaagtgcagcatgttgactagtacatgaccacttga

SEQ ID NO: 39821 - DNA, 76 bp, Artificial Sequence
  Description of Artificial Sequence: Synthetic Peanut control sequences; 5' sequence + inner sequence + 3' sequence
tagggaagagaaggacatatgatggacgcgatctggcagtgagcatgcactcgttgactagtacatgaccacttga

SEQ ID NO: 39822 - DNA, 76 bp, Artificial Sequence; identical to SEQ ID NO: 15936
  Description of Artificial Sequence: Synthetic Peanut control sequences; 5' sequence + inner sequence + 3' sequence

SEQ ID NO: 39823 - DNA, 76 bp, Artificial Sequence; identical to SEQ ID NO: 3195
  Description of Artificial Sequence: Synthetic Peanut control sequences; 5' sequence + inner sequence + 3' sequence

SEQ ID NO: 39824 - DNA, 76 bp, Artificial Sequence; identical to SEQ ID NO: 7364
  Description of Artificial Sequence: Synthetic Peanut control sequences; 5' sequence + inner sequence + 3' sequence

SEQ ID NO: 39825 - DNA, 76 bp, Artificial Sequence; identical to SEQ ID NO: 3177
  Description of Artificial Sequence: Synthetic Peanut control sequences; 5' sequence + inner sequence + 3' sequence

SEQ ID NO: 39826 - DNA, 76 bp, Artificial Sequence; identical to SEQ ID NO: 3662
  Description of Artificial Sequence: Synthetic Peanut control sequences; 5' sequence + inner sequence + 3' sequence

SEQ ID NO: 39827 - DNA, 76 bp, Artificial Sequence
  Description of Artificial Sequence: Synthetic Peanut control sequences; 5' sequence + inner sequence + 3' sequence
tagggaagagaaggacatatgatgtcattccgcatcctacacgtgggaacgtattgactagtacatgaccacttga

SEQ ID NO: 39828 - DNA, 76 bp, Artificial Sequence; identical to SEQ ID NO: 3326
  Description of Artificial Sequence: Synthetic Peanut control sequences; 5' sequence + inner sequence + 3' sequence

SEQ ID NO: 39829 - DNA, 76 bp, Artificial Sequence; identical to SEQ ID NO: 3236
  Description of Artificial Sequence: Synthetic Peanut control sequences; 5' sequence + inner sequence + 3' sequence

SEQ ID NO: 39830 - DNA, 76 bp, Artificial Sequence
  Description of Artificial Sequence: Synthetic Peanut control sequences; 5' sequence + inner sequence + 3' sequence
tagggaagagaaggacatatgatggacatcgctaacctacaatgtgcgtcgtgttgactagtacatgaccacttga

SEQ ID NO: 39831 - DNA, 76 bp, Artificial Sequence; identical to SEQ ID NO: 23777
  Description of Artificial Sequence: Synthetic Peanut control sequences; 5' sequence + inner sequence + 3' sequence

SEQ ID NO: 39832 - DNA, 76 bp, Artificial Sequence; identical to SEQ ID NO: 3072
  Description of Artificial Sequence: Synthetic Peanut control sequences; 5' sequence + inner sequence + 3' sequence

SEQ ID NO: 39833 - DNA, 76 bp, Artificial Sequence; identical to SEQ ID NO: 3727
  Description of Artificial Sequence: Synthetic Peanut control sequences; 5' sequence + inner sequence + 3' sequence

SEQ ID NO: 39834 - DNA, 76 bp, Artificial Sequence; identical to SEQ ID NO: 3775
  Description of Artificial Sequence: Synthetic Peanut control sequences; 5' sequence + inner sequence + 3' sequence

SEQ ID NO: 39835 - DNA, 76 bp, Artificial Sequence; identical to SEQ ID NO: 11889
  Description of Artificial Sequence: Synthetic Peanut control sequences; 5' sequence + inner sequence + 3' sequence

SEQ ID NO: 39836 - DNA, 77 bp, Artificial Sequence
  Description of Artificial Sequence: Synthetic Peanut control sequences; 5' sequence + inner sequence + 3' sequence
tagggaagagaaggacatatgatccgaacgaaccgcacgtggactgagcgacgtttgactagtacatgaccacttga

SEQ ID NO: 39837 - DNA, 76 bp, Artificial Sequence; identical to SEQ ID NO: 7935
  Description of Artificial Sequence: Synthetic Peanut control sequences; 5' sequence + inner sequence + 3' sequence

SEQ ID NO: 39838 - DNA, 76 bp, Artificial Sequence; identical to SEQ ID NO: 11869
  Description of Artificial Sequence: Synthetic Peanut control sequences; 5' sequence + inner sequence + 3' sequence

SEQ ID NO: 39839 - DNA, 76 bp, Artificial Sequence
  Description of Artificial Sequence: Synthetic Peanut control sequences; 5' sequence + inner sequence + 3' sequence
tagggaagagaaggacatatgatggcctgatcgaacctagagaggggcgtggattgactagtacatgaccacttga

SEQ ID NO: 39840 - DNA, 76 bp, Artificial Sequence; identical to SEQ ID NO: 7722
  Description of Artificial Sequence: Synthetic Peanut control sequences; 5' sequence + inner sequence + 3' sequence

SEQ ID NO: 39841 - DNA, 76 bp, Artificial Sequence; identical to SEQ ID NO: 3551
  Description of Artificial Sequence: Synthetic Peanut control sequences; 5' sequence + inner sequence + 3' sequence

SEQ ID NO: 39842 - DNA, 76 bp, Artificial Sequence; identical to SEQ ID NO: 23327
  Description of Artificial Sequence: Synthetic Peanut control sequences; 5' sequence + inner sequence + 3' sequence

SEQ ID NO: 39843 - DNA, 76 bp, Artificial Sequence; identical to SEQ ID NO: 23227
  Description of Artificial Sequence: Synthetic Peanut control sequences; 5' sequence + inner sequence + 3' sequence

SEQ ID NO: 39844 - DNA, 76 bp, Artificial Sequence
  Description of Artificial Sequence: Synthetic Peanut control sequences; 5' sequence + inner sequence + 3' sequence
tagggaagagaaggacatatgatggacggatcgaacctacaagttgtcgtggtttgactagtacatgaccacttga

SEQ ID NO: 39845 - DNA, 75 bp, Artificial Sequence; identical to SEQ ID NO: 3879
  Description of Artificial Sequence: Synthetic Peanut control sequences; 5' sequence + inner sequence + 3' sequence

SEQ ID NO: 39846 - DNA, 76 bp, Artificial Sequence; identical to SEQ ID NO: 31577
  Description of Artificial Sequence: Synthetic Peanut control sequences; 5' sequence + inner sequence + 3' sequence

SEQ ID NO: 39847 - DNA, 76 bp, Artificial Sequence; identical to SEQ ID NO: 35009
  Description of Artificial Sequence: Synthetic Peanut control sequences; 5' sequence + inner sequence + 3' sequence

SEQ ID NO: 39848 - DNA, 76 bp, Artificial Sequence; identical to SEQ ID NO: 11767
  Description of Artificial Sequence: Synthetic Peanut control sequences; 5' sequence + inner sequence + 3' sequence

SEQ ID NO: 39849 - DNA, 76 bp, Artificial Sequence; identical to SEQ ID NO: 23331
  Description of Artificial Sequence: Synthetic Peanut control sequences; 5' sequence + inner sequence + 3' sequence

SEQ ID NO: 39850 - DNA, 76 bp, Artificial Sequence; identical to SEQ ID NO: 11627
  Description of Artificial Sequence: Synthetic Peanut control sequences; 5' sequence + inner sequence + 3' sequence

SEQ ID NO: 39851 - DNA, 76 bp, Artificial Sequence
  Description of Artificial Sequence: Synthetic Peanut control sequences; 5' sequence + inner sequence + 3' sequence
tagggaagagaaggacatatgatgtcacacgctctgcccttatcacgtggacattgactagtacatgaccacttga

SEQ ID NO: 39852 - DNA, 76 bp, Artificial Sequence; identical to SEQ ID NO: 3580
  Description of Artificial Sequence: Synthetic Peanut control sequences; 5' sequence + inner sequence + 3' sequence

SEQ ID NO: 39853 - DNA, 76 bp, Artificial Sequence; identical to SEQ ID NO: 3906
  Description of Artificial Sequence: Synthetic Peanut control sequences; 5' sequence + inner sequence + 3' sequence

SEQ ID NO: 39854 - DNA, 76 bp, Artificial Sequence; identical to SEQ ID NO: 7740
  Description of Artificial Sequence: Synthetic Peanut control sequences; 5' sequence + inner sequence + 3' sequence

SEQ ID NO: 39855 - DNA, 76 bp, Artificial Sequence; identical to SEQ ID NO: 7579
  Description of Artificial Sequence: Synthetic Peanut control sequences; 5' sequence + inner sequence + 3' sequence

SEQ ID NO: 39856 - DNA, 76 bp, Artificial Sequence; identical to SEQ ID NO: 11936
  Description of Artificial Sequence: Synthetic Peanut control sequences; 5' sequence + inner sequence + 3' sequence

SEQ ID NO: 39857 - DNA, 76 bp, Artificial Sequence; identical to SEQ ID NO: 3962
  Description of Artificial Sequence: Synthetic Peanut control sequences; 5' sequence + inner sequence + 3' sequence

SEQ ID NO: 39858 - DNA, 76 bp, Artificial Sequence; identical to SEQ ID NO: 31652
  Description of Artificial Sequence: Synthetic Peanut control sequences; 5' sequence + inner sequence + 3' sequence

SEQ ID NO: 39859 - DNA, 76 bp, Artificial Sequence; identical to SEQ ID NO: 7449
  Description of Artificial Sequence: Synthetic Peanut control sequences; 5' sequence + inner sequence + 3' sequence

SEQ ID NO: 39860 - DNA, 76 bp, Artificial Sequence; identical to SEQ ID NO: 11798
  Description of Artificial Sequence: Synthetic Peanut control sequences; 5' sequence + inner sequence + 3' sequence

SEQ ID NO: 39861 - DNA, 76 bp, Artificial Sequence
  Description of Artificial Sequence: Synthetic Peanut control sequences; 5' sequence + inner sequence + 3' sequence
tagggaagagaaggacatatgatggccgaacgaaccttggtcagctaggcagtttgactagtacatgaccacttga

SEQ ID NO: 39862 - DNA, 76 bp, Artificial Sequence; identical to SEQ ID NO: 3556
  Description of Artificial Sequence: Synthetic Peanut control sequences; 5' sequence + inner sequence + 3' sequence

SEQ ID NO: 39863 - DNA, 76 bp, Artificial Sequence; identical to SEQ ID NO: 3991
  Description of Artificial Sequence: Synthetic Peanut control sequences; 5' sequence + inner sequence + 3' sequence

SEQ ID NO: 39864 - DNA, 76 bp, Artificial Sequence; identical to SEQ ID NO: 3619
  Description of Artificial Sequence: Synthetic Peanut control sequences; 5' sequence + inner sequence + 3' sequence

SEQ ID NO: 39865 - DNA, 76 bp, Artificial Sequence; identical to SEQ ID NO: 3621
  Description of Artificial Sequence: Synthetic Peanut control sequences; 5' sequence + inner sequence + 3' sequence

SEQ ID NO: 39866 - DNA, 76 bp, Artificial Sequence; identical to SEQ ID NO: 3075
  Description of Artificial Sequence: Synthetic Peanut control sequences; 5' sequence + inner sequence + 3' sequence

SEQ ID NO: 39867 - DNA, 73 bp, Artificial Sequence; identical to SEQ ID NO: 35422
  Description of Artificial Sequence: Synthetic Peanut control sequences; 5' sequence + inner sequence + 3' sequence

SEQ ID NO: 39868 - DNA, 76 bp, Artificial Sequence; identical to SEQ ID NO: 7782
  Description of Artificial Sequence: Synthetic Peanut control sequences; 5' sequence + inner sequence + 3' sequence

SEQ ID NO: 39869 - DNA, 76 bp, Artificial Sequence
  Description of Artificial Sequence: Synthetic Peanut control sequences; 5' sequence + inner sequence + 3' sequence
tagggaagagaaggacatatgatgtacacagcgcaccctatcgagcttggtcattgactagtacatgaccacttga

SEQ ID NO: 39870 - DNA, 76 bp, Artificial Sequence; identical to SEQ ID NO: 3653
  Description of Artificial Sequence: Synthetic Peanut control sequences; 5' sequence + inner sequence + 3' sequence

SEQ ID NO: 39871 - DNA, 76 bp, Artificial Sequence; identical to SEQ ID NO: 15986
  Description of Artificial Sequence: Synthetic Peanut control sequences; 5' sequence + inner sequence + 3' sequence

SEQ ID NO: 39872 - DNA, 76 bp, Artificial Sequence; identical to SEQ ID NO: 3322
  Description of Artificial Sequence: Synthetic Peanut control sequences; 5' sequence + inner sequence + 3' sequence

SEQ ID NO: 39873 - DNA, 76 bp, Artificial Sequence
  Description of Artificial Sequence: Synthetic Peanut control sequences; 5' sequence + inner sequence + 3' sequence
tagggaagagaaggacatatgatggcctgatcgaacctagagagtggcgtggtttgactagtacatgaccacttga

SEQ ID NO: 39874 - DNA, 76 bp, Artificial Sequence; identical to SEQ ID NO: 15866
  Description of Artificial Sequence: Synthetic Peanut control sequences; 5' sequence + inner sequence + 3' sequence

SEQ ID NO: 39875 - DNA, 76 bp, Artificial Sequence; identical to SEQ ID NO: 3534
  Description of Artificial Sequence: Synthetic Peanut control sequences; 5' sequence + inner sequence + 3' sequence

SEQ ID NO: 39876 - DNA, 76 bp, Artificial Sequence
  Description of Artificial Sequence: Synthetic Peanut control sequences; 5' sequence + inner sequence + 3' sequence
tagggaagagaaggacatatgatggccagatcgaccctatcaagtgcagcatgttgactagtacatgaccacttga

SEQ ID NO: 39877 - DNA, 76 bp, Artificial Sequence
  Description of Artificial Sequence: Synthetic Peanut control sequences; 5' sequence + inner sequence + 3' sequence
tagggaagagaaggacatatgatggcctgatcgaccctatcaagtgcagcatgttgactagtacatgaccacttga

SEQ ID NO: 39878 - DNA, 76 bp, Artificial Sequence
  Description of Artificial Sequence: Synthetic Peanut control sequences; 5' sequence + inner sequence + 3' sequence
tagggaagagaaggacatatgatggatgcactcaaccgatccaaggtgcgtcattgactagtacatgaccacttga

SEQ ID NO: 39879 - DNA, 76 bp, Artificial Sequence
  Description of Artificial Sequence: Synthetic Peanut control sequences; 5' sequence + inner sequence + 3' sequence
tagggaagagaaggacatatgatggacgcaacttcactcaagtgtggcgtggattgactagtacatgaccacttga

SEQ ID NO: 39880 - DNA, 76 bp, Artificial Sequence; identical to SEQ ID NO: 7642
  Description of Artificial Sequence: Synthetic Peanut control sequences; 5' sequence + inner sequence + 3' sequence

SEQ ID NO: 39881 - DNA, 76 bp, Artificial Sequence; identical to SEQ ID NO: 11837
  Description of Artificial Sequence: Synthetic Peanut control sequences; 5' sequence + inner sequence + 3' sequence

SEQ ID NO: 39882 - DNA, 76 bp, Artificial Sequence; identical to SEQ ID NO: 15853
  Description of Artificial Sequence: Synthetic Peanut control sequences; 5' sequence + inner sequence + 3' sequence

SEQ ID NO: 39883 - DNA, 76 bp, Artificial Sequence; identical to SEQ ID NO: 3661
  Description of Artificial Sequence: Synthetic Peanut control sequences; 5' sequence + inner sequence + 3' sequence

SEQ ID NO: 39884 - DNA, 75 bp, Artificial Sequence; identical to SEQ ID NO: 35937
  Description of Artificial Sequence: Synthetic Peanut control sequences; 5' sequence + inner sequence + 3' sequence

SEQ ID NO: 39885 - DNA, 73 bp, Artificial Sequence
  Description of Artificial Sequence: Synthetic Peanut control sequences; 5' sequence + inner sequence + 3' sequence
tagggaagagaaggacatatgatccatcgcgtcactatcatgaggccatgttgactagtacatgaccacttga

SEQ ID NO: 39886 - DNA, 76 bp, Artificial Sequence; identical to SEQ ID NO: 23458
  Description of Artificial Sequence: Synthetic Peanut control sequences; 5' sequence + inner sequence + 3' sequence

SEQ ID NO: 39887 - DNA, 76 bp, Artificial Sequence; identical to SEQ ID NO: 7938
  Description of Artificial Sequence: Synthetic Peanut control sequences; 5' sequence + inner sequence + 3' sequence

SEQ ID NO: 39888 - DNA, 76 bp, Artificial Sequence; identical to SEQ ID NO: 7933
  Description of Artificial Sequence: Synthetic Peanut control sequences; 5' sequence + inner sequence + 3' sequence

SEQ ID NO: 39889 - DNA, 76 bp, Artificial Sequence
  Description of Artificial Sequence: Synthetic Peanut control sequences; 5' sequence + inner sequence + 3' sequence
tagggaagagaaggacatatgatggacggatcgaccctatcaagtgcagcatgttgactagtacatgaccacttga

SEQ ID NO: 39890 - DNA, 76 bp, Artificial Sequence; identical to SEQ ID NO: 23462
  Description of Artificial Sequence: Synthetic Peanut control sequences; 5' sequence + inner sequence + 3' sequence

SEQ ID NO: 39891 - DNA, 76 bp, Artificial Sequence; identical to SEQ ID NO: 11993
  Description of Artificial Sequence: Synthetic Peanut control sequences; 5' sequence + inner sequence + 3' sequence

SEQ ID NO: 39892 - DNA, 76 bp, Artificial Sequence; identical to SEQ ID NO: 7998
  Description of Artificial Sequence: Synthetic Peanut control sequences; 5' sequence + inner sequence + 3' sequence

SEQ ID NO: 39893 - DNA, 76 bp, Artificial Sequence; identical to SEQ ID NO: 11927
  Description of Artificial Sequence: Synthetic Peanut control sequences; 5' sequence + inner sequence + 3' sequence

SEQ ID NO: 39894 - DNA, 76 bp, Artificial Sequence; identical to SEQ ID NO: 7918
  Description of Artificial Sequence: Synthetic Peanut control sequences; 5' sequence + inner sequence + 3' sequence

SEQ ID NO: 39895 - DNA, 76 bp, Artificial Sequence; identical to SEQ ID NO: 15803
  Description of Artificial Sequence: Synthetic Peanut control sequences; 5' sequence + inner sequence + 3' sequence

SEQ ID NO: 39896 - DNA, 72 bp, Artificial Sequence
  Description of Artificial Sequence: Synthetic Peanut control sequences; 5' sequence + inner sequence + 3' sequence
tagggaagagaaggacatatgatggacgcatcgccccttcgagtggacattgactagtacatgaccacttga

SEQ ID NO: 39897 - DNA, 76 bp, Artificial Sequence; identical to SEQ ID NO: 15795
  Description of Artificial Sequence: Synthetic Peanut control sequences; 5' sequence + inner sequence + 3' sequence

SEQ ID NO: 39898 - DNA, 76 bp, Artificial Sequence; identical to SEQ ID NO: 7801
  Description of Artificial Sequence: Synthetic Peanut control sequences; 5' sequence + inner sequence + 3' sequence

SEQ ID NO: 39899 - DNA, 76 bp, Artificial Sequence; identical to SEQ ID NO: 35584
  Description of Artificial Sequence: Synthetic Peanut control sequences; 5' sequence + inner sequence + 3' sequence

SEQ ID NO: 39900 - DNA, 77 bp, Artificial Sequence; identical to SEQ ID NO: 31816
  Description of Artificial Sequence: Synthetic Peanut control sequences; 5' sequence + inner sequence + 3' sequence

SEQ ID NO: 39901 - DNA, 76 bp, Artificial Sequence
  Description of Artificial Sequence: Synthetic Peanut control sequences; 5' sequence + inner sequence + 3' sequence
tagggaagagaaggacatatgatccgcctcgacctggctcatgtggccgtgtgttgactagtacatgaccacttga

SEQ ID NO: 39902 - DNA, 76 bp, Artificial Sequence; identical to SEQ ID NO: 3224
  Description of Artificial Sequence: Synthetic Peanut control sequences; 5' sequence + inner sequence + 3' sequence

SEQ ID NO: 39903 - DNA, 76 bp, Artificial Sequence; identical to SEQ ID NO: 7692
  Description of Artificial Sequence: Synthetic Peanut control sequences; 5' sequence + inner sequence + 3' sequence

SEQ ID NO: 39904 - DNA, 76 bp, Artificial Sequence
  Description of Artificial Sequence: Synthetic Peanut control sequences; 5' sequence + inner sequence + 3' sequence
tagggaagagaaggacatatgatgtgcaagcgagcctaccttgacgtgcgtcattgactagtacatgaccacttga

SEQ ID NO: 39905 - DNA, 76 bp, Artificial Sequence; identical to SEQ ID NO: 23580
  Description of Artificial Sequence: Synthetic Peanut control sequences; 5' sequence + inner sequence + 3' sequence

SEQ ID NO: 39906 - DNA, 75 bp, Artificial Sequence
  Description of Artificial Sequence: Synthetic Peanut control sequences; 5' sequence + inner sequence + 3' sequence
tagggaagagaaggacatatgatgcactggctgacctacacgtgggcacgtattgactagtacatgaccacttga

SEQ ID NO: 39907 - DNA, 76 bp, Artificial Sequence
  Description of Artificial Sequence: Synthetic Peanut control sequences; 5' sequence + inner sequence + 3' sequence
tagggaagagaaggacatatgatgtgtccgagctgggtgtggtcctgcttggcttgactagtacatgaccacttga

SEQ ID NO: 39908 - DNA, 76 bp, Artificial Sequence
  Description of Artificial Sequence: Synthetic Peanut control sequences; 5' sequence + inner sequence + 3' sequence
tagggaagagaaggacatatgatgcacctgaacgccactcaagttgccgtggattgactagtacatgaccacttga

SEQ ID NO: 39909 - DNA, 76 bp, Artificial Sequence
  Description of Artificial Sequence: Synthetic Peanut control sequences; 5' sequence + inner sequence + 3' sequence
tagggaagagaaggacatatgattgtcctgacgtgccctgacatgctgcgtcattgactagtacatgaccacttga

SEQ ID NO: 39910 - DNA, 76 bp, Artificial Sequence; identical to SEQ ID NO: 3616
  Description of Artificial Sequence: Synthetic Peanut control sequences; 5' sequence + inner sequence + 3' sequence

SEQ ID NO: 39911 - DNA, 76 bp, Artificial Sequence; identical to SEQ ID NO: 23817
  Description of Artificial Sequence: Synthetic Peanut control sequences; 5' sequence + inner sequence + 3' sequence

SEQ ID NO: 39912 - DNA, 76 bp, Artificial Sequence; identical to SEQ ID NO: 11935
  Description of Artificial Sequence: Synthetic Peanut control sequences; 5' sequence + inner sequence + 3' sequence

SEQ ID NO: 39913 - DNA, 76 bp, Artificial Sequence; identical to SEQ ID NO: 3206
  Description of Artificial Sequence: Synthetic Peanut control sequences; 5' sequence + inner sequence + 3' sequence

SEQ ID NO: 39914 - DNA, 77 bp, Artificial Sequence
  Description of Artificial Sequence: Synthetic Peanut control sequences; 5' sequence + inner sequence + 3' sequence
tagggaagagaaggacatatgatgtgcgtgcgatctgaccgtgcaagttgggcattgactagtacatgaccacttga

SEQ ID NO: 39915 - DNA, 76 bp, Artificial Sequence; identical to SEQ ID NO: 31844
  Description of Artificial Sequence: Synthetic Peanut control sequences; 5' sequence + inner sequence + 3' sequence

SEQ ID NO: 39916 - DNA, 76 bp, Artificial Sequence; identical to SEQ ID NO: 11907
  Description of Artificial Sequence: Synthetic Peanut control sequences; 5' sequence + inner sequence + 3' sequence

SEQ ID NO: 39917 - DNA, 76 bp, Artificial Sequence; identical to SEQ ID NO: 3152
  Description of Artificial Sequence: Synthetic Peanut control sequences; 5' sequence + inner sequence + 3' sequence

SEQ ID NO: 39918 - DNA, 76 bp, Artificial Sequence; identical to SEQ ID NO: 7857
  Description of Artificial Sequence: Synthetic Peanut control sequences; 5' sequence + inner sequence + 3' sequence

SEQ ID NO: 39919 - DNA, 76 bp, Artificial Sequence; identical to SEQ ID NO: 23324
  Description of Artificial Sequence: Synthetic Peanut control sequences; 5' sequence + inner sequence + 3' sequence

SEQ ID NO: 39920 - DNA, 76 bp, Artificial Sequence
  Description of Artificial Sequence: Synthetic Peanut control sequences; 5' sequence + inner sequence + 3' sequence
tagggaagagaaggacatatgattggccgatcgaacctatcaagtgcagcatgttgactagtacatgaccacttga

SEQ ID NO: 39921 - DNA, 76 bp, Artificial Sequence; identical to SEQ ID NO: 7969
  Description of Artificial Sequence: Synthetic Peanut control sequences; 5' sequence + inner sequence + 3' sequence

SEQ ID NO: 39922 - DNA, 76 bp, Artificial Sequence; identical to SEQ ID NO: 23427
  Description of Artificial Sequence: Synthetic Peanut control sequences; 5' sequence + inner sequence + 3' sequence

SEQ ID NO: 39923 - DNA, 76 bp, Artificial Sequence
  Description of Artificial Sequence: Synthetic Peanut control sequences; 5' sequence + inner sequence + 3' sequence
tagggaagagaaggacatatgatggacgaacgtaacgtgagagtgtgcatggattgactagtacatgaccacttga

SEQ ID NO: 39924 - DNA, 76 bp, Artificial Sequence
  Description of Artificial Sequence: Synthetic Peanut control sequences; 5' sequence + inner sequence + 3' sequence
tagggaagagaaggacatatgatgcaccgtacgcttgacctacacgtggctcattgactagtacatgaccacttga

SEQ ID NO: 39925 - DNA, 76 bp, Artificial Sequence; identical to SEQ ID NO: 7419
  Description of Artificial Sequence: Synthetic Peanut control sequences; 5' sequence + inner sequence + 3' sequence

SEQ ID NO: 39926 - DNA, 76 bp, Artificial Sequence; identical to SEQ ID NO: 3874
  Description of Artificial Sequence: Synthetic Peanut control sequences; 5' sequence + inner sequence + 3' sequence

SEQ ID NO: 39927 - DNA, 76 bp, Artificial Sequence
  Description of Artificial Sequence: Synthetic Peanut control sequences; 5' sequence + inner sequence + 3' sequence
tagggaagagaaggacatatgatccgctcgatgaacgtgaatgggcatgcgtcttgactagtacatgaccacttga

SEQ ID NO: 39928 - DNA, 76 bp, Artificial Sequence
  Description of Artificial Sequence: Synthetic Peanut control sequences; 5' sequence + inner sequence + 3' sequence
tagggaagagaaggacatatgatgtcgtgactggctagctggacatgcactgtttgactagtacatgaccacttga

SEQ ID NO: 39929 - DNA, 76 bp, Artificial Sequence; identical to SEQ ID NO: 11991
  Description of Artificial Sequence: Synthetic Peanut control sequences; 5' sequence + inner sequence + 3' sequence

SEQ ID NO: 39930 - DNA, 76 bp, Artificial Sequence; identical to SEQ ID NO: 23879
  Description of Artificial Sequence: Synthetic Peanut control sequences; 5' sequence + inner sequence + 3' sequence

SEQ ID NO: 39931 - DNA, 76 bp, Artificial Sequence; identical to SEQ ID NO: 11752
  Description of Artificial Sequence: Synthetic Peanut control sequences; 5' sequence + inner sequence + 3' sequence

SEQ ID NO: 39932 - DNA, 76 bp, Artificial Sequence
  Description of Artificial Sequence: Synthetic Peanut control sequences; 5' sequence + inner sequence + 3' sequence
tagggaagagaaggacatatgattggccgatcgaccctgtcaagtgcagcatgttgactagtacatgaccacttga

SEQ ID NO: 39933 - DNA, 73 bp, Artificial Sequence
  Description of Artificial Sequence: Synthetic Peanut control sequences; 5' sequence + inner sequence + 3' sequence
tagggaagagaaggacatatgattggccgatcgacactagcaagtgtgcattgactagtacatgaccacttga

SEQ ID NO: 39934 - DNA, 76 bp, Artificial Sequence; identical to SEQ ID NO: 7376
  Description of Artificial Sequence: Synthetic Peanut control sequences; 5' sequence + inner sequence + 3' sequence

SEQ ID NO: 39935 - DNA, 76 bp, Artificial Sequence; identical to SEQ ID NO: 3749
  Description of Artificial Sequence: Synthetic Peanut control sequences; 5' sequence + inner sequence + 3' sequence

SEQ ID NO: 39936 - DNA, 76 bp, Artificial Sequence
  Description of Artificial Sequence: Synthetic Peanut control sequences; 5' sequence + inner sequence + 3' sequence
tagggaagagaaggacatatgatgggccgatcgaccctatcaagtgcagcatgttgactagtacatgaccacttga

SEQ ID NO: 39937 - DNA, 76 bp, Artificial Sequence; identical to SEQ ID NO: 11872
  Description of Artificial Sequence: Synthetic Peanut control sequences; 5' sequence + inner sequence + 3' sequence

SEQ ID NO: 39938 - DNA, 76 bp, Artificial Sequence; identical to SEQ ID NO: 3827
  Description of Artificial Sequence: Synthetic Peanut control sequences; 5' sequence + inner sequence + 3' sequence

SEQ ID NO: 39939 - DNA, 76 bp, Artificial Sequence
  Description of Artificial Sequence: Synthetic Peanut control sequences; 5' sequence + inner sequence + 3' sequence
tagggaagagaaggacatatgatccgatctggcgtagctggaacatgtgcgtgttgactagtacatgaccacttga

SEQ ID NO: 39940 - DNA, 76 bp, Artificial Sequence; identical to SEQ ID NO: 3481
  Description of Artificial Sequence: Synthetic Peanut control sequences; 5' sequence + inner sequence + 3' sequence

SEQ ID NO: 39941 - DNA, 76 bp, Artificial Sequence
  Description of Artificial Sequence: Synthetic Peanut control sequences; 5' sequence + inner sequence + 3' sequence
tagggaagagaaggacatatgatgtccgtgcttgaccgtagagtgtgcgtgtattgactagtacatgaccacttga

SEQ ID NO: 39942 - DNA, 76 bp, Artificial Sequence
  Description of Artificial Sequence: Synthetic Peanut control sequences; 5' sequence + inner sequence + 3' sequence
tagggaagagaaggacatatgatccgatgctgcccgtcatgtgtggcgatgtgttgactagtacatgaccacttga

SEQ ID NO: 39943 - DNA, 76 bp, Artificial Sequence; identical to SEQ ID NO: 31917
  Description of Artificial Sequence: Synthetic Peanut control sequences; 5' sequence + inner sequence + 3' sequence

SEQ ID NO: 39944 - DNA, 76 bp, Artificial Sequence; identical to SEQ ID NO: 11801
  Description of Artificial Sequence: Synthetic Peanut control sequences; 5' sequence + inner sequence + 3' sequence

SEQ ID NO: 39945 - DNA, 72 bp, Artificial Sequence; identical to SEQ ID NO: 3822
  Description of Artificial Sequence: Synthetic Peanut control sequences; 5' sequence + inner sequence + 3' sequence

SEQ ID NO: 39946 - DNA, 76 bp, Artificial Sequence
  Description of Artificial Sequence: Synthetic Peanut control sequences; 5' sequence + inner sequence + 3' sequence
tagggaagagaaggacatatgattggctgatcgaccctatcaagtgcagcatgttgactagtacatgaccacttga

SEQ ID NO: 39947 - DNA, 76 bp, Artificial Sequence; identical to SEQ ID NO: 3396
  Description of Artificial Sequence: Synthetic Peanut control sequences; 5' sequence + inner sequence + 3' sequence

SEQ ID NO: 39948 - DNA, 76 bp, Artificial Sequence; identical to SEQ ID NO: 31879
  Description of Artificial Sequence: Synthetic Peanut control sequences; 5' sequence + inner sequence + 3' sequence

SEQ ID NO: 39949 - DNA, 81 bp, Artificial Sequence
  Description of Artificial Sequence: Synthetic Peanut control sequences; 5' sequence + inner sequence + 3' sequence
tagggaagagaaggacatatgatgcattggacgatcgtgccctacacgtgggaatggattgactagtacatgaccacttga

SEQ ID NO: 39950 - DNA, 76 bp, Artificial Sequence; identical to SEQ ID NO: 35175
  Description of Artificial Sequence: Synthetic Peanut control sequences; 5' sequence + inner sequence + 3' sequence

SEQ ID NO: 39951 - DNA, 76 bp, Artificial Sequence; identical to SEQ ID NO: 23424
  Description of Artificial Sequence: Synthetic Peanut control sequences; 5' sequence + inner sequence + 3' sequence

SEQ ID NO: 39952 - DNA, 76 bp, Artificial Sequence; identical to SEQ ID NO: 7810
  Description of Artificial Sequence: Synthetic Peanut control sequences; 5' sequence + inner sequence + 3' sequence

SEQ ID NO: 39953 - DNA, 76 bp, Artificial Sequence; identical to SEQ ID NO: 35268
  Description of Artificial Sequence: Synthetic Peanut control sequences; 5' sequence + inner sequence + 3' sequence

SEQ ID NO: 39954 - DNA, 77 bp, Artificial Sequence
  Description of Artificial Sequence: Synthetic Peanut control sequences; 5' sequence + inner sequence + 3' sequence
tagggaagagaaggacatatgattggccgaacgaccgatcgagtggcgcatggattgactagtacatgaccacttga

SEQ ID NO: 39955 - DNA, 76 bp, Artificial Sequence; identical to SEQ ID NO: 11891
  Description of Artificial Sequence: Synthetic Peanut control sequences; 5' sequence + inner sequence + 3' sequence

SEQ ID NO: 39956 - DNA, 76 bp, Artificial Sequence; identical to SEQ ID NO: 23623
  Description of Artificial Sequence: Synthetic Peanut control sequences; 5' sequence + inner sequence + 3' sequence

SEQ ID NO: 39957 - DNA, 76 bp, Artificial Sequence; identical to SEQ ID NO: 19962
  Description of Artificial Sequence: Synthetic Peanut control sequences; 5' sequence + inner sequence + 3' sequence

SEQ ID NO: 39958 - DNA, 76 bp, Artificial Sequence; identical to SEQ ID NO: 35384
  Description of Artificial Sequence: Synthetic Peanut control sequences; 5' sequence + inner sequence + 3' sequence

SEQ ID NO: 39959 - DNA, 77 bp, Artificial Sequence; identical to SEQ ID NO: 3971
  Description of Artificial Sequence: Synthetic Peanut control sequences; 5' sequence + inner sequence + 3' sequence

SEQ ID NO: 39960 - DNA, 76 bp, Artificial Sequence; identical to SEQ ID NO: 15914
  Description of Artificial Sequence: Synthetic Peanut control sequences; 5' sequence + inner sequence + 3' sequence

SEQ ID NO: 39961 - DNA, 76 bp, Artificial Sequence
  Description of Artificial Sequence: Synthetic Peanut control sequences; 5' sequence + inner sequence + 3' sequence
tagggaagagaaggacatatgatggacgacgcgagccctacatgtgtcgtggattgactagtacatgaccacttga

SEQ ID NO: 39962 - DNA, 74 bp, Artificial Sequence; identical to SEQ ID NO: 23328
  Description of Artificial Sequence: Synthetic Peanut control sequences; 5' sequence + inner sequence + 3' sequence

SEQ ID NO: 39963 - DNA, 81 bp, Artificial Sequence
  Description of Artificial Sequence: Synthetic Peanut control sequences; 5' sequence + inner sequence + 3' sequence
tagggaagagaaggacatatgataatgcggcatgaacggacctacacgtgggcacgtattgactagtacatgaccacttga

SEQ ID NO: 39964 - DNA, 76 bp, Artificial Sequence; identical to SEQ ID NO: 15428
  Description of Artificial Sequence: Synthetic Peanut control sequences; 5' sequence + inner sequence + 3' sequence

SEQ ID NO: 39965 - DNA, 76 bp, Artificial Sequence; identical to SEQ ID NO: 3972
  Description of Artificial Sequence: Synthetic Peanut control sequences; 5' sequence + inner sequence + 3' sequence

SEQ ID NO: 39966 - DNA, 76 bp, Artificial Sequence
  Description of Artificial Sequence: Synthetic Peanut control sequences; 5' sequence + inner sequence + 3' sequence
tagggaagagaaggacatatgatggccaatcatcccgtcaagtgaggtgtggattgactagtacatgaccacttga

SEQ ID NO: 39967 - DNA, 76 bp, Artificial Sequence
  Description of Artificial Sequence: Synthetic Peanut control sequences; 5' sequence + inner sequence + 3' sequence
tagggaagagaaggacatatgatggcctgatcgaacctagagagtggcgtggcttgactagtacatgaccacttga

SEQ ID NO: 39968 - DNA, 76 bp, Artificial Sequence
  Description of Artificial Sequence: Synthetic Peanut control sequences; 5' sequence + inner sequence + 3' sequence
tagggaagagaaggacatatgattgcatgtgccgtctcgctcccggtgtggcattgactagtacatgaccacttga

SEQ ID NO: 39969 - DNA, 76 bp, Artificial Sequence; identical to SEQ ID NO: 3375
  Description of Artificial Sequence: Synthetic Peanut control sequences; 5' sequence + inner sequence + 3' sequence

SEQ ID NO: 39970 - DNA, 76 bp, Artificial Sequence; identical to SEQ ID NO: 15945
  Description of Artificial Sequence: Synthetic Peanut control sequences; 5' sequence + inner sequence + 3' sequence

SEQ ID NO: 39971 - DNA, 76 bp, Artificial Sequence; identical to SEQ ID NO: 35006
  Description of Artificial Sequence: Synthetic Peanut control sequences; 5' sequence + inner sequence + 3' sequence

SEQ ID NO: 39972 - DNA, 76 bp, Artificial Sequence; identical to SEQ ID NO: 23415
  Description of Artificial Sequence: Synthetic Peanut control sequences; 5' sequence + inner sequence + 3' sequence

SEQ ID NO: 39973 - DNA, 76 bp, Artificial Sequence; identical to SEQ ID NO: 7405
  Description of Artificial Sequence: Synthetic Peanut control sequences; 5' sequence + inner sequence + 3' sequence

SEQ ID NO: 39974 - DNA, 76 bp, Artificial Sequence
  Description of Artificial Sequence: Synthetic Peanut control sequences; 5' sequence + inner sequence + 3' sequence
tagggaagagaaggacatatgatgcttcgatggatgctgggcaggcacgcagtttgactagtacatgaccacttga

SEQ ID NO: 39975 - DNA, 76 bp, Artificial Sequence; identical to SEQ ID NO: 7631
  Description of Artificial Sequence: Synthetic Peanut control sequences; 5' sequence + inner sequence + 3' sequence

SEQ ID NO: 39976 - DNA, 76 bp, Artificial Sequence; identical to SEQ ID NO: 3773
  Description of Artificial Sequence: Synthetic Peanut control sequences; 5' sequence + inner sequence + 3' sequence

SEQ ID NO: 39977 - DNA, 76 bp, Artificial Sequence; identical to SEQ ID NO: 3486
  Description of Artificial Sequence: Synthetic Peanut control sequences; 5' sequence + inner sequence + 3' sequence

SEQ ID NO: 39978 - DNA, 76 bp, Artificial Sequence; identical to SEQ ID NO: 23803
  Description of Artificial Sequence: Synthetic Peanut control sequences; 5' sequence + inner sequence + 3' sequence

SEQ ID NO: 39979 - DNA, 75 bp, Artificial Sequence
  Description of Artificial Sequence: Synthetic Peanut control sequences; 5' sequence + inner sequence + 3' sequence
tagggaagagaaggacatatgatgaccgaacgtaccggtggcatgcacgccattgactagtacatgaccacttga

SEQ ID NO: 39980 - DNA, 76 bp, Artificial Sequence; identical to SEQ ID NO: 11953
  Description of Artificial Sequence: Synthetic Peanut control sequences; 5' sequence + inner sequence + 3' sequence

SEQ ID NO: 39981 - DNA, 76 bp, Artificial Sequence; identical to SEQ ID NO: 23882
  Description of Artificial Sequence: Synthetic Peanut control sequences; 5' sequence + inner sequence + 3' sequence

SEQ ID NO: 39982 - DNA, 76 bp, Artificial Sequence
  Description of Artificial Sequence: Synthetic Peanut control sequences; 5' sequence + inner sequence + 3' sequence
tagggaagagaaggacatatgattggccgatcgaccctatcaagttcagcatgttgactagtacatgaccacttga

SEQ ID NO: 39983 - DNA, 76 bp, Artificial Sequence; identical to SEQ ID NO: 31957
  Description of Artificial Sequence: Synthetic Peanut control sequences; 5' sequence + inner sequence + 3' sequence

SEQ ID NO: 39984 - DNA, 76 bp, Artificial Sequence; identical to SEQ ID NO: 3543
  Description of Artificial Sequence: Synthetic Peanut control sequences; 5' sequence + inner sequence + 3' sequence

SEQ ID NO: 39985 - DNA, 76 bp, Artificial Sequence; identical to SEQ ID NO: 11946
  Description of Artificial Sequence: Synthetic Peanut control sequences; 5' sequence + inner sequence + 3' sequence

SEQ ID NO: 39986 - DNA, 76 bp, Artificial Sequence
  Description of Artificial Sequence: Synthetic Peanut control sequences; 5' sequence + inner sequence + 3' sequence
tagggaagagaaggacatatgatgtcacgaaacggcaccttcatgtggacgtgttgactagtacatgaccacttga

SEQ ID NO: 39987 - DNA, 76 bp, Artificial Sequence; identical to SEQ ID NO: 31485
  Description of Artificial Sequence: Synthetic Peanut control sequences; 5' sequence + inner sequence + 3' sequence

SEQ ID NO: 39988 - DNA, 76 bp, Artificial Sequence; identical to SEQ ID NO: 3267
  Description of Artificial Sequence: Synthetic Peanut control sequences; 5' sequence + inner sequence + 3' sequence

SEQ ID NO: 39989 - DNA, 76 bp, Artificial Sequence; identical to SEQ ID NO: 3892
  Description of Artificial Sequence: Synthetic Peanut control sequences; 5' sequence + inner sequence + 3' sequence

SEQ ID NO: 39990 - DNA, 76 bp, Artificial Sequence; identical to SEQ ID NO: 7761
  Description of Artificial Sequence: Synthetic Peanut control sequences; 5' sequence + inner sequence + 3' sequence

SEQ ID NO: 39991 - DNA, 76 bp, Artificial Sequence; identical to SEQ ID NO: 27872
  Description of Artificial Sequence: Synthetic Peanut control sequences; 5' sequence + inner sequence + 3' sequence

SEQ ID NO: 39992 - DNA, 76 bp, Artificial Sequence
  Description of Artificial Sequence: Synthetic Peanut control sequences; 5' sequence + inner sequence + 3' sequence
tagggaagagaaggacatatgatggcatgcacgcaccctatcatgaggccatgttgactagtacatgaccacttga

SEQ ID NO: 39993 - DNA, 76 bp, Artificial Sequence
  Description of Artificial Sequence: Synthetic Peanut control sequences; 5' sequence + inner sequence + 3' sequence
tagggaagagaaggacatatgattggtcgatcgaccctatcaagtgcagcatgttgactagtacatgaccacttga

SEQ ID NO: 39994 - DNA, 76 bp, Artificial Sequence; identical to SEQ ID NO: 11670
  Description of Artificial Sequence: Synthetic Peanut control sequences; 5' sequence + inner sequence + 3' sequence

SEQ ID NO: 39995 - DNA, 76 bp, Artificial Sequence; identical to SEQ ID NO: 23801
  Description of Artificial Sequence: Synthetic Peanut control sequences; 5' sequence + inner sequence + 3' sequence

SEQ ID NO: 39996 - DNA, 76 bp, Artificial Sequence
  Description of Artificial Sequence: Synthetic Peanut control sequences; 5' sequence + inner sequence + 3' sequence
tagggaagagaaggacatatgatctcgacgagtaggcatgtcttctgtgtgcattgactagtacatgaccacttga

SEQ ID NO: 39997 - DNA, 76 bp, Artificial Sequence; identical to SEQ ID NO: 3608
  Description of Artificial Sequence: Synthetic Peanut control sequences; 5' sequence + inner sequence + 3' sequence

SEQ ID NO: 39998 - DNA, 76 bp, Artificial Sequence; identical to SEQ ID NO: 23530
  Description of Artificial Sequence: Synthetic Peanut control sequences; 5' sequence + inner sequence + 3' sequence

SEQ ID NO: 39999 - DNA, 76 bp, Artificial Sequence; identical to SEQ ID NO: 7721
  Description of Artificial Sequence: Synthetic Peanut control sequences; 5' sequence + inner sequence + 3' sequence

SEQ ID NO: 40000 - DNA, 76 bp, Artificial Sequence
  Description of Artificial Sequence: Synthetic Peanut control sequences; 5' sequence + inner sequence + 3' sequence
tagggaagagaaggacatatgatgacctggctcgaccttcaatgcgtcgtggattgactagtacatgaccacttga

SEQ ID NO: 40001 - DNA, 76 bp, Artificial Sequence
  Description of Artificial Sequence: Synthetic Peanut control sequences; 5' sequence + inner sequence + 3' sequence
tagggaagagaaggacatatgatccgtcacgtacctatcacgtgtcatgctgcttgactagtacatgaccacttga

SEQ ID NO: 40002 - DNA, 76 bp, Artificial Sequence; identical to SEQ ID NO: 23984
  Description of Artificial Sequence: Synthetic Peanut control sequences; 5' sequence + inner sequence + 3' sequence

SEQ ID NO: 40003 - DNA, 30 bp, Artificial Sequence; identical to SEQ ID NO: 24
  Description of Artificial Sequence: Synthetic gluten; inner sequence

SEQ ID NO: 40004 - DNA, 30 bp, Artificial Sequence; identical to SEQ ID NO: 34
  Description of Artificial Sequence: Synthetic gluten; inner sequence

SEQ ID NO: 40005 - DNA, 30 bp, Artificial Sequence; identical to SEQ ID NO: 40
  Description of Artificial Sequence: Synthetic gluten; inner sequence

SEQ ID NO: 40006 - DNA, 30 bp, Artificial Sequence; identical to SEQ ID NO: 17
  Description of Artificial Sequence: Synthetic gluten; inner sequence

SEQ ID NO: 40007 - DNA, 30 bp, Artificial Sequence; identical to SEQ ID NO: 464
  Description of Artificial Sequence: Synthetic gluten; inner sequence

SEQ ID NO: 40008 - DNA, 30 bp, Artificial Sequence; identical to SEQ ID NO: 39
  Description of Artificial Sequence: Synthetic gluten; inner sequence

SEQ ID NO: 40009 - DNA, 30 bp, Artificial Sequence; identical to SEQ ID NO: 8
  Description of Artificial Sequence: Synthetic gluten; inner sequence

SEQ ID NO: 40010 - DNA, 30 bp, Artificial Sequence; identical to SEQ ID NO: 6
  Description of Artificial Sequence: Synthetic gluten; inner sequence

SEQ ID NO: 40011 - DNA, 30 bp, Artificial Sequence; identical to SEQ ID NO: 631
  Description of Artificial Sequence: Synthetic gluten; inner sequence

SEQ ID NO: 40012 - DNA, 30 bp, Artificial Sequence; identical to SEQ ID NO: 19
  Description of Artificial Sequence: Synthetic gluten; inner sequence

SEQ ID NO: 40013 - DNA, 30 bp, Artificial Sequence; identical to SEQ ID NO: 10
  Description of Artificial Sequence: Synthetic gluten; inner sequence

SEQ ID NO: 40014 - DNA, 30 bp, Artificial Sequence; identical to SEQ ID NO: 52
  Description of Artificial Sequence: Synthetic gluten; inner sequence

SEQ ID NO: 40015 - DNA, 30 bp, Artificial Sequence; identical to SEQ ID NO: 74
  Description of Artificial Sequence: Synthetic gluten; inner sequence

SEQ ID NO: 40016 - DNA, 30 bp, Artificial Sequence; identical to SEQ ID NO: 94
  Description of Artificial Sequence: Synthetic gluten; inner sequence

SEQ ID NO: 40017 - DNA, 30 bp, Artificial Sequence; identical to SEQ ID NO: 139
  Description of Artificial Sequence: Synthetic gluten; inner sequence

SEQ ID NO: 40018 - DNA, 30 bp, Artificial Sequence; identical to SEQ ID NO: 60
  Description of Artificial Sequence: Synthetic gluten; inner sequence

SEQ ID NO: 40019 - DNA, 30 bp, Artificial Sequence; identical to SEQ ID NO: 116
  Description of Artificial Sequence: Synthetic gluten; inner sequence

SEQ ID NO: 40020 - DNA, 30 bp, Artificial Sequence; identical to SEQ ID NO: 273
  Description of Artificial Sequence: Synthetic gluten; inner sequence

SEQ ID NO: 40021 - DNA, 30 bp, Artificial Sequence; identical to SEQ ID NO: 22
  Description of Artificial Sequence: Synthetic gluten; inner sequence

SEQ ID NO: 40022 - DNA, 30 bp, Artificial Sequence; identical to SEQ ID NO: 12
  Description of Artificial Sequence: Synthetic gluten; inner sequence

SEQ ID NO: 40023 - DNA, 30 bp, Artificial Sequence; identical to SEQ ID NO: 27
  Description of Artificial Sequence: Synthetic gluten; inner sequence

SEQ ID NO: 40024 - DNA, 30 bp, Artificial Sequence; identical to SEQ ID NO: 53
  Description of Artificial Sequence: Synthetic gluten; inner sequence

SEQ ID NO: 40025 - DNA, 30 bp, Artificial Sequence; identical to SEQ ID NO: 47
  Description of Artificial Sequence: Synthetic gluten; inner sequence

SEQ ID NO: 40026 - DNA, 30 bp, Artificial Sequence; identical to SEQ ID NO: 37
  Description of Artificial Sequence: Synthetic gluten; inner sequence

SEQ ID NO: 40027 - DNA, 30 bp, Artificial Sequence
  Description of Artificial Sequence: Synthetic gluten; inner sequence
catgtgcgaaccgagcttgtacaaggcata

SEQ ID NO: 40028 - DNA, 30 bp, Artificial Sequence; identical to SEQ ID NO: 59
  Description of Artificial Sequence: Synthetic gluten; inner sequence

SEQ ID NO: 40029 - DNA, 30 bp, Artificial Sequence; identical to SEQ ID NO: 32
  Description of Artificial Sequence: Synthetic gluten; inner sequence

SEQ ID NO: 40030 - DNA, 30 bp, Artificial Sequence; identical to SEQ ID NO: 58
  Description of Artificial Sequence: Synthetic gluten; inner sequence

SEQ ID NO: 40031 - DNA, 30 bp, Artificial Sequence; identical to SEQ ID NO: 4874
  Description of Artificial Sequence: Synthetic gluten; inner sequence

SEQ ID NO: 40032 - DNA, 30 bp, Artificial Sequence; identical to SEQ ID NO: 308
  Description of Artificial Sequence: Synthetic gluten; inner sequence

SEQ ID NO: 40033 - DNA, 30 bp, Artificial Sequence; identical to SEQ ID NO: 383
  Description of Artificial Sequence: Synthetic gluten; inner sequence

SEQ ID NO: 40034 - DNA, 30 bp, Artificial Sequence; identical to SEQ ID NO: 377
  Description of Artificial Sequence: Synthetic gluten; inner sequence

SEQ ID NO: 40035 - DNA, 30 bp, Artificial Sequence; identical to SEQ ID NO: 82
  Description of Artificial Sequence: Synthetic gluten; inner sequence

SEQ ID NO: 40036 - DNA, 30 bp, Artificial Sequence; identical to SEQ ID NO: 238
  Description of Artificial Sequence: Synthetic gluten; inner sequence

SEQ ID NO: 40037 - DNA, 30 bp, Artificial Sequence; identical to SEQ ID NO: 55
  Description of Artificial Sequence: Synthetic gluten; inner sequence

SEQ ID NO: 40038 - DNA, 29 bp, Artificial Sequence
  Description of Artificial Sequence: Synthetic gluten; inner sequence
gcacgtcgaaacacgtagccatgcacggt

SEQ ID NO: 40039 - DNA, 30 bp, Artificial Sequence; identical to SEQ ID NO: 3
  Description of Artificial Sequence: Synthetic gluten; inner sequence

SEQ ID NO: 40040 - DNA, 30 bp, Artificial Sequence; identical to SEQ ID NO: 128
  Description of Artificial Sequence: Synthetic gluten; inner sequence

SEQ ID NO: 40041 - DNA, 30 bp, Artificial Sequence; identical to SEQ ID NO: 4513
  Description of Artificial Sequence: Synthetic gluten; inner sequence

SEQ ID NO: 40042 - DNA, 30 bp, Artificial Sequence; identical to SEQ ID NO: 4814
  Description of Artificial Sequence: Synthetic gluten; inner sequence

SEQ ID NO: 40043 - DNA, 30 bp, Artificial Sequence; identical to SEQ ID NO: 23
  Description of Artificial Sequence: Synthetic gluten; inner sequence

SEQ ID NO: 40044 - DNA, 27 bp, Artificial Sequence
  Description of Artificial Sequence: Synthetic gluten; inner sequence
gtgcgaccgaccctatcaagtacgtca

SEQ ID NO: 40045 - DNA, 30 bp, Artificial Sequence; identical to SEQ ID NO: 645
  Description of Artificial Sequence: Synthetic gluten; inner sequence

SEQ ID NO: 40046 - DNA, 30 bp, Artificial Sequence; identical to SEQ ID NO: 5
  Description of Artificial Sequence: Synthetic gluten; inner sequence

SEQ ID NO: 40047 - DNA, 30 bp, Artificial Sequence; identical to SEQ ID NO: 438
  Description of Artificial Sequence: Synthetic gluten; inner sequence

SEQ ID NO: 40048 - DNA, 25 bp, Artificial Sequence
  Description of Artificial Sequence: Synthetic gluten; inner sequence
ggcctgcgatggatgtgtgcgtgta

SEQ ID NO: 40049 - DNA, 30 bp, Artificial Sequence; identical to SEQ ID NO: 28427
  Description of Artificial Sequence: Synthetic gluten; inner sequence

SEQ ID NO: 40050 - DNA, 30 bp, Artificial Sequence; identical to SEQ ID NO: 15
  Description of Artificial Sequence: Synthetic gluten; inner sequence

SEQ ID NO: 40051 - DNA, 30 bp, Artificial Sequence; identical to SEQ ID NO: 29
  Description of Artificial Sequence: Synthetic gluten; inner sequence

SEQ ID NO: 40052 - DNA, 30 bp, Artificial Sequence
  Description of Artificial Sequence: Synthetic gluten; inner sequence
gtcatgcgatggaagagaatgtgcattgtc

SEQ ID NO: 40053 - DNA, 30 bp, Artificial Sequence; identical to SEQ ID NO: 777
  Description of Artificial Sequence: Synthetic gluten; inner sequence

SEQ ID NO: 40054 - DNA, 30 bp, Artificial Sequence; identical to SEQ ID NO: 142
  Description of Artificial Sequence: Synthetic gluten; inner sequence

SEQ ID NO: 40055 - DNA, 30 bp, Artificial Sequence
  Description of Artificial Sequence: Synthetic gluten; inner sequence
gtcatgcgatctcactatcaagtgttggca

SEQ ID NO: 40056 - DNA, 30 bp, Artificial Sequence; identical to SEQ ID NO: 147
  Description of Artificial Sequence: Synthetic gluten; inner sequence

SEQ ID NO: 40057 - DNA, 30 bp, Artificial Sequence; identical to SEQ ID NO: 218
  Description of Artificial Sequence: Synthetic gluten; inner sequence

SEQ ID NO: 40058 - DNA, 30 bp, Artificial Sequence; identical to SEQ ID NO: 328
  Description of Artificial Sequence: Synthetic gluten; inner sequence

SEQ ID NO: 40059 - DNA, 30 bp, Artificial Sequence; identical to SEQ ID NO: 133
  Description of Artificial Sequence: Synthetic gluten; inner sequence

SEQ ID NO: 40060 - DNA, 30 bp, Artificial Sequence
  Description of Artificial Sequence: Synthetic gluten; inner sequence
ggactgcgatggatggggcaatacgacgtt

SEQ ID NO: 40061 - DNA, 30 bp, Artificial Sequence; identical to SEQ ID NO: 9
  Description of Artificial Sequence: Synthetic gluten; inner sequence

SEQ ID NO: 40062 - DNA, 30 bp, Artificial Sequence; identical to SEQ ID NO: 4860
  Description of Artificial Sequence: Synthetic gluten; inner sequence

SEQ ID NO: 40063 - DNA, 29 bp, Artificial Sequence
  Description of Artificial Sequence: Synthetic gluten; inner sequence
gcacgccgatgccctcatgtggccgtgga

SEQ ID NO: 40064 - DNA, 30 bp, Artificial Sequence; identical to SEQ ID NO: 968
  Description of Artificial Sequence: Synthetic gluten; inner sequence

SEQ ID NO: 40065 - DNA, 30 bp, Artificial Sequence
  Description of Artificial Sequence: Synthetic gluten; inner sequence
gacgtcgatgaaccttcgagtgagcatgta

SEQ ID NO: 40066 - DNA, 30 bp, Artificial Sequence; identical to SEQ ID NO: 11
  Description of Artificial Sequence: Synthetic gluten; inner sequence

SEQ ID NO: 40067 - DNA, 30 bp, Artificial Sequence
  Description of Artificial Sequence: Synthetic gluten; inner sequence
ccgacgaagataaggcagagaggcatccta

SEQ ID NO: 40068 - DNA, 30 bp, Artificial Sequence; identical to SEQ ID NO: 12799
  Description of Artificial Sequence: Synthetic gluten; inner sequence

SEQ ID NO: 40069 - DNA, 30 bp, Artificial Sequence; identical to SEQ ID NO: 950
  Description of Artificial Sequence: Synthetic gluten; inner sequence

SEQ ID NO: 40070 - DNA, 30 bp, Artificial Sequence; identical to SEQ ID NO: 13
  Description of Artificial Sequence: Synthetic gluten; inner sequence

SEQ ID NO: 40071 - DNA, 30 bp, Artificial Sequence; identical to SEQ ID NO: 80
  Description of Artificial Sequence: Synthetic gluten; inner sequence

SEQ ID NO: 40072 - DNA, 30 bp, Artificial Sequence; identical to SEQ ID NO: 28947
  Description of Artificial Sequence: Synthetic gluten; inner sequence

SEQ ID NO: 40073 - DNA, 30 bp, Artificial Sequence
  Description of Artificial Sequence: Synthetic gluten; inner sequence
ggacaatgcgaaccgttcaagtcgaatgga

SEQ ID NO: 40074 - DNA, 30 bp, Artificial Sequence; identical to SEQ ID NO: 715
  Description of Artificial Sequence: Synthetic gluten; inner sequence

SEQ ID NO: 40075 - DNA, 30 bp, Artificial Sequence; identical to SEQ ID NO: 66
  Description of Artificial Sequence: Synthetic gluten; inner sequence

SEQ ID NO: 40076 - DNA, 30 bp, Artificial Sequence; identical to SEQ ID NO: 253
  Description of Artificial Sequence: Synthetic gluten; inner sequence

SEQ ID NO: 40077 - DNA, 30 bp, Artificial Sequence; identical to SEQ ID NO: 28989
  Description of Artificial Sequence: Synthetic gluten; inner sequence

SEQ ID NO: 40078 - DNA, 30 bp, Artificial Sequence; identical to SEQ ID NO: 8988
  Description of Artificial Sequence: Synthetic gluten; inner sequence

SEQ ID NO: 40079 - DNA, 30 bp, Artificial Sequence; identical to SEQ ID NO: 741
  Description of Artificial Sequence: Synthetic gluten; inner sequence

SEQ ID NO: 40080 - DNA, 30 bp, Artificial Sequence; identical to SEQ ID NO: 28
  Description of Artificial Sequence: Synthetic gluten; inner sequence

SEQ ID NO: 40081 - DNA, 30 bp, Artificial Sequence
  Description of Artificial Sequence: Synthetic gluten; inner sequence
acattggacggaacgacccttcaagcgggc

SEQ ID NO: 40082 - DNA, 30 bp, Artificial Sequence
  Description of Artificial Sequence: Synthetic gluten; inner sequence
aggcacgagctccagaaccttcagtcagca

SEQ ID NO: 40083 - DNA, 30 bp, Artificial Sequence; identical to SEQ ID NO: 191
  Description of Artificial Sequence: Synthetic gluten; inner sequence

SEQ ID NO: 40084 - DNA, 30 bp, Artificial Sequence; identical to SEQ ID NO: 16
  Description of Artificial Sequence: Synthetic gluten; inner sequence

SEQ ID NO: 40085 - DNA, 30 bp, Artificial Sequence; identical to SEQ ID NO: 8991
  Description of Artificial Sequence: Synthetic gluten; inner sequence

SEQ ID NO: 40086 - DNA, 30 bp, Artificial Sequence
  Description of Artificial Sequence: Synthetic gluten; inner sequence
ggccgtcgatgagcgcgcatgtatcgtgtc

SEQ ID NO: 40087 - DNA, 30 bp, Artificial Sequence
  Description of Artificial Sequence: Synthetic gluten; inner sequence
ggcatgctcgaccctcatgtgggacaggta

SEQ ID NO: 40088 - DNA, 30 bp, Artificial Sequence; identical to SEQ ID NO: 4981
  Description of Artificial Sequence: Synthetic gluten; inner sequence

SEQ ID NO: 40089 - DNA, 30 bp, Artificial Sequence; identical to SEQ ID NO: 41
  Description of Artificial Sequence: Synthetic gluten; inner sequence

SEQ ID NO: 40090 - DNA, 30 bp, Artificial Sequence
  Description of Artificial Sequence: Synthetic gluten; inner sequence
catgtgcaacgtatagccgaaatgggcata

SEQ ID NO: 40091 - DNA, 30 bp, Artificial Sequence; identical to SEQ ID NO: 316
  Description of Artificial Sequence: Synthetic gluten; inner sequence

SEQ ID NO: 40092 - DNA, 30 bp, Artificial Sequence; identical to SEQ ID NO: 692
  Description of Artificial Sequence: Synthetic gluten; inner sequence

SEQ ID NO: 40093 - DNA, 30 bp, Artificial Sequence; identical to SEQ ID NO: 4644
  Description of Artificial Sequence: Synthetic gluten; inner sequence

SEQ ID NO: 40094 - DNA, 30 bp, Artificial Sequence
  Description of Artificial Sequence: Synthetic gluten; inner sequence
catatggacagcgctacactcaagtcgtca

SEQ ID NO: 40095 - DNA, 30 bp, Artificial Sequence; identical to SEQ ID NO: 816
  Description of Artificial Sequence: Synthetic gluten; inner sequence

SEQ ID NO: 40096 - DNA, 30 bp, Artificial Sequence
  Description of Artificial Sequence: Synthetic gluten; inner sequence
ggacaaacgcacctatcaagtgagatggca

SEQ ID NO: 40097 - DNA, 30 bp, Artificial Sequence; identical to SEQ ID NO: 702
  Description of Artificial Sequence: Synthetic gluten; inner sequence

SEQ ID NO: 40098 - DNA, 30 bp, Artificial Sequence; identical to SEQ ID NO: 889
  Description of Artificial Sequence: Synthetic gluten; inner sequence

SEQ ID NO: 40099 - DNA, 30 bp, Artificial Sequence
  Description of Artificial Sequence: Synthetic gluten; inner sequence
gtactgcacgaccgatagagcatggactgt

SEQ ID NO: 40100 - DNA, 30 bp, Artificial Sequence
  Description of Artificial Sequence: Synthetic gluten; inner sequence
gtaccaacgcacccttcaagatgtcatgga

SEQ ID NO: 40101 - DNA, 30 bp, Artificial Sequence
  Description of Artificial Sequence: Synthetic gluten; inner sequence
ggacagcgatggatgtggaaatgcgacgtc

SEQ ID NO: 40102 - DNA, 30 bp, Artificial Sequence
  Description of Artificial Sequence: Synthetic gluten; inner sequence
ggcatgcgattccctgtcaacgcttgatca

SEQ ID NO: 40103 - DNA, 30 bp, Artificial Sequence
  Description of Artificial Sequence: Synthetic gluten; inner sequence
ggcctgatcgaacctagagagaggcgtgga

SEQ ID NO: 40104 - DNA, 30 bp, Artificial Sequence; identical to SEQ ID NO: 4234
  Description of Artificial Sequence: Synthetic gluten; inner sequence

SEQ ID NO: 40105 - DNA, 30 bp, Artificial Sequence
  Description of Artificial Sequence: Synthetic gluten; inner sequence
ccatcatggcatgatattcactggcgtgtc

SEQ ID NO: 40106 - DNA, 30 bp, Artificial Sequence; identical to SEQ ID NO: 45
  Description of Artificial Sequence: Synthetic gluten; inner sequence

SEQ ID NO: 40107 - DNA, 30 bp, Artificial Sequence; identical to SEQ ID NO: 28662
  Description of Artificial Sequence: Synthetic gluten; inner sequence

SEQ ID NO: 40108 - DNA, 30 bp, Artificial Sequence; identical to SEQ ID NO: 265
  Description of Artificial Sequence: Synthetic gluten; inner sequence

SEQ ID NO: 40109 - DNA, 30 bp, Artificial Sequence; identical to SEQ ID NO: 203
  Description of Artificial Sequence: Synthetic gluten; inner sequence

SEQ ID NO: 40110 - DNA, 30 bp, Artificial Sequence; identical to SEQ ID NO: 764
  Description of Artificial Sequence: Synthetic gluten; inner sequence

SEQ ID NO: 40111 - DNA, 30 bp, Artificial Sequence
  Description of Artificial Sequence: Synthetic gluten; inner sequence
cgatcacgagaagatgaactgcgatggatg

SEQ ID NO: 40112 - DNA, 30 bp, Artificial Sequence; identical to SEQ ID NO: 7
  Description of Artificial Sequence: Synthetic gluten; inner sequence

SEQ ID NO: 40113 - DNA, 30 bp, Artificial Sequence
  Description of Artificial Sequence: Synthetic gluten; inner sequence
gacgacgcgaacctatcaagggctcatgga

SEQ ID NO: 40114 - DNA, 30 bp, Artificial Sequence; identical to SEQ ID NO: 99
  Description of Artificial Sequence: Synthetic gluten; inner sequence

SEQ ID NO: 40115 - DNA, 30 bp, Artificial Sequence
  Description of Artificial Sequence: Synthetic gluten; inner sequence
gtcatgcgttgacctaccagtggccaggta

SEQ ID NO: 40116 - DNA, 30 bp, Artificial Sequence
  Description of Artificial Sequence: Synthetic gluten; inner sequence
tggccgacctattgcctaacaagtgtggca

SEQ ID NO: 40117 - DNA, 30 bp, Artificial Sequence
  Description of Artificial Sequence: Synthetic gluten; inner sequence
tggccgacgagtcactatcaagttcgggca

SEQ ID NO: 40118 - DNA, 30 bp, Artificial Sequence
  Description of Artificial Sequence: Synthetic gluten; inner sequence
atgcacttcgatggatggtcagccacgacg

SEQ ID NO: 40119 - DNA, 30 bp, Artificial Sequence; identical to SEQ ID NO: 4535
  Description of Artificial Sequence: Synthetic gluten; inner sequence

SEQ ID NO: 40120 - DNA, 30 bp, Artificial Sequence
  Description of Artificial Sequence: Synthetic gluten; inner sequence
ggcctgatcgaacctagagagcggcgtgga

SEQ ID NO: 40121 - DNA, 30 bp, Artificial Sequence
  Description of Artificial Sequence: Synthetic gluten; inner sequence
acatgtcacgaacgaacctacatgtggaca

SEQ ID NO: 40122 - DNA, 30 bp, Artificial Sequence
  Description of Artificial Sequence: Synthetic gluten; inner sequence
catgtacacagtgcagcaccatgtggcata

SEQ ID NO: 40123 - DNA, 30 bp, Artificial Sequence; identical to SEQ ID NO: 122
  Description of Artificial Sequence: Synthetic gluten; inner sequence

SEQ ID NO: 40124 - DNA, 30 bp, Artificial Sequence; identical to SEQ ID NO: 145
  Description of Artificial Sequence: Synthetic gluten; inner sequence

SEQ ID NO: 40125 - DNA, 30 bp, Artificial Sequence; identical to SEQ ID NO: 911
  Description of Artificial Sequence: Synthetic gluten; inner sequence

SEQ ID NO: 40126 - DNA, 30 bp, Artificial Sequence; identical to SEQ ID NO: 49
  Description of Artificial Sequence: Synthetic gluten; inner sequence

SEQ ID NO: 40127 - DNA, 30 bp, Artificial Sequence; identical to SEQ ID NO: 4889
  Description of Artificial Sequence: Synthetic gluten; inner sequence

SEQ ID NO: 40128 - DNA, 30 bp, Artificial Sequence; identical to SEQ ID NO: 311
  Description of Artificial Sequence: Synthetic gluten; inner sequence

SEQ ID NO: 40129 - DNA, 30 bp, Artificial Sequence
  Description of Artificial Sequence: Synthetic gluten; inner sequence
ggacagagcgaacccttcaagtgtgctgta

SEQ ID NO: 40130 - DNA, 30 bp, Artificial Sequence
  Description of Artificial Sequence: Synthetic gluten; inner sequence
gaccgaacggaacttcatgtgcgatatgta

SEQ ID NO: 40131 - DNA, 30 bp, Artificial Sequence
  Description of Artificial Sequence: Synthetic gluten; inner sequence
ggacaaacgcagcctacatgtggaagtgta

SEQ ID NO: 40132 - DNA, 30 bp, Artificial Sequence
  Description of Artificial Sequence: Synthetic gluten; inner sequence
gtcatgcgatggattgggcattgcgtaggc

SEQ ID NO: 40133 - DNA, 30 bp, Artificial Sequence
  Description of Artificial Sequence: Synthetic gluten; inner sequence
catgtacacatggacagcgtgaacgtcata

SEQ ID NO: 40134 - DNA, 30 bp, Artificial Sequence; identical to SEQ ID NO: 264
  Description of Artificial Sequence: Synthetic gluten; inner sequence

SEQ ID NO: 40135 - DNA, 30 bp, Artificial Sequence; identical to SEQ ID NO: 4254
  Description of Artificial Sequence: Synthetic gluten; inner sequence

SEQ ID NO: 40136 - DNA, 30 bp, Artificial Sequence; identical to SEQ ID NO: 31
  Description of Artificial Sequence: Synthetic gluten; inner sequence

SEQ ID NO: 40137 - DNA, 30 bp, Artificial Sequence
  Description of Artificial Sequence: Synthetic gluten; inner sequence
gacattcacgaacctacaactggacgtgta

SEQ ID NO: 40138 - DNA, 30 bp, Artificial Sequence
  Description of Artificial Sequence: Synthetic gluten; inner sequence
catgtgcggaaaggcgtcgaagaaggcata

SEQ ID NO: 40139 - DNA, 30 bp, Artificial Sequence
  Description of Artificial Sequence: Synthetic gluten; inner sequence
catgtgcgaactagtatcgtttagagcata

SEQ ID NO: 40140 - DNA, 30 bp, Artificial Sequence
  Description of Artificial Sequence: Synthetic gluten; inner sequence
gacgtgaacgacctcaagggacatgcacta

SEQ ID NO: 40141 - DNA, 30 bp, Artificial Sequence
  Description of Artificial Sequence: Synthetic gluten; inner sequence
aatatggccgagacaagctacgagctagtt

SEQ ID NO: 40142 - DNA, 30 bp, Artificial Sequence
  Description of Artificial Sequence: Synthetic gluten; inner sequence
catgacgacaccgagcgtatacacgacata

SEQ ID NO: 40143 - DNA, 30 bp, Artificial Sequence; identical to SEQ ID NO: 703
  Description of Artificial Sequence: Synthetic gluten; inner sequence

SEQ ID NO: 40144 - DNA, 30 bp, Artificial Sequence
  Description of Artificial Sequence: Synthetic gluten; inner sequence
ggccgacgatggaagtgagcttgcctagtc

SEQ ID NO: 40145 - DNA, 30 bp, Artificial Sequence
  Description of Artificial Sequence: Synthetic gluten; inner sequence
acgtcacgggaaacttgccggcattgtagc

SEQ ID NO: 40146 - DNA, 30 bp, Artificial Sequence
  Description of Artificial Sequence: Synthetic gluten; inner sequence
tcatcacatgaacgcgttctgagctggtca

SEQ ID NO: 40147 - DNA, 30 bp, Artificial Sequence
  Description of Artificial Sequence: Synthetic gluten; inner sequence
gtaccgaacgtagcctaaagtgatcgtgga

SEQ ID NO: 40148 - DNA, 30 bp, Artificial Sequence; identical to SEQ ID NO: 230
  Description of Artificial Sequence: Synthetic gluten; inner sequence

SEQ ID NO: 40149 - DNA, 30 bp, Artificial Sequence; identical to SEQ ID NO: 215
  Description of Artificial Sequence: Synthetic gluten; inner sequence

SEQ ID NO: 40150 - DNA, 30 bp, Artificial Sequence
  Description of Artificial Sequence: Synthetic gluten; inner sequence
tggaacgcagaaaggtggatcggtcaacaa

SEQ ID NO: 40151 - DNA, 30 bp, Artificial Sequence; identical to SEQ ID NO: 207
  Description of Artificial Sequence: Synthetic gluten; inner sequence

SEQ ID NO: 40152 - DNA, 30 bp, Artificial Sequence
  Description of Artificial Sequence: Synthetic gluten; inner sequence
ggcatgcgatgagctcaagttggccttgta

SEQ ID NO: 40153 - DNA, 30 bp, Artificial Sequence; identical to SEQ ID NO: 14
  Description of Artificial Sequence: Synthetic gluten; inner sequence

SEQ ID NO: 40154 - DNA, 30 bp, Artificial Sequence; identical to SEQ ID NO: 25
  Description of Artificial Sequence: Synthetic gluten; inner sequence

SEQ ID NO: 40155 - DNA, 30 bp, Artificial Sequence
  Description of Artificial Sequence: Synthetic gluten; inner sequence
ccgacgatgaccgtgagactcaagcggaca

SEQ ID NO: 40156 - DNA, 30 bp, Artificial Sequence; identical to SEQ ID NO: 4775
  Description of Artificial Sequence: Synthetic gluten; inner sequence

SEQ ID NO: 40157 - DNA, 30 bp, Artificial Sequence; identical to SEQ ID NO: 714
  Description of Artificial Sequence: Synthetic gluten; inner sequence

SEQ ID NO: 40158 - DNA, 30 bp, Artificial Sequence; identical to SEQ ID NO: 906
  Description of Artificial Sequence: Synthetic gluten; inner sequence

SEQ ID NO: 40159 - DNA, 30 bp, Artificial Sequence
  Description of Artificial Sequence: Synthetic gluten; inner sequence
aacatggccgacgacaccgatcatgtggga

SEQ ID NO: 40160 - DNA, 30 bp, Artificial Sequence; identical to SEQ ID NO: 93
  Description of Artificial Sequence: Synthetic gluten; inner sequence

SEQ ID NO: 40161 - DNA, 30 bp, Artificial Sequence; identical to SEQ ID NO: 299
  Description of Artificial Sequence: Synthetic gluten; inner sequence

SEQ ID NO: 40162 - DNA, 30 bp, Artificial Sequence; identical to SEQ ID NO: 33
  Description of Artificial Sequence: Synthetic gluten; inner sequence

SEQ ID NO: 40163 - DNA, 30 bp, Artificial Sequence
  Description of Artificial Sequence: Synthetic gluten; inner sequence
cgaacgcaccgtaagaactggacagtcaca

SEQ ID NO: 40164 - DNA, 30 bp, Artificial Sequence
  Description of Artificial Sequence: Synthetic gluten; inner sequence
catgtacgcataaaggtgcagtcactcata

SEQ ID NO: 40165 - DNA, 30 bp, Artificial Sequence; identical to SEQ ID NO: 36702
  Description of Artificial Sequence: Synthetic gluten; inner sequence

SEQ ID NO: 40166 - DNA, 30 bp, Artificial Sequence; identical to SEQ ID NO: 36967
  Description of Artificial Sequence: Synthetic gluten; inner sequence

SEQ ID NO: 40167 - DNA, 30 bp, Artificial Sequence; identical to SEQ ID NO: 8401
  Description of Artificial Sequence: Synthetic gluten; inner sequence

SEQ ID NO: 40168 - DNA, 30 bp, Artificial Sequence; identical to SEQ ID NO: 243
  Description of Artificial Sequence: Synthetic gluten; inner sequence

SEQ ID NO: 40169 - DNA, 30 bp, Artificial Sequence; identical to SEQ ID NO: 134
  Description of Artificial Sequence: Synthetic gluten; inner sequence

SEQ ID NO: 40170 - DNA, 30 bp, Artificial Sequence
  Description of Artificial Sequence: Synthetic gluten; inner sequence
ccatcagatgcaaaacgacaattgggcatt

SEQ ID NO: 40171 - DNA, 30 bp, Artificial Sequence; identical to SEQ ID NO: 4451
  Description of Artificial Sequence: Synthetic gluten; inner sequence

SEQ ID NO: 40172 - DNA, 30 bp, Artificial Sequence
  Description of Artificial Sequence: Synthetic gluten; inner sequence
gtcacactctgaacgtcaatggtcgatgga

SEQ ID NO: 40173 - DNA, 30 bp, Artificial Sequence; identical to SEQ ID NO: 811
  Description of Artificial Sequence: Synthetic gluten; inner sequence

SEQ ID NO: 40174 - DNA, 30 bp, Artificial Sequence
  Description of Artificial Sequence: Synthetic gluten; inner sequence
catgtacgcaccacgtatgcaaatatcata

SEQ ID NO: 40175 - DNA, 30 bp, Artificial Sequence
  Description of Artificial Sequence: Synthetic gluten; inner sequence
ggcctgatcgaacctagagagtggcgcgga

SEQ ID NO: 40176 - DNA, 30 bp, Artificial Sequence
  Description of Artificial Sequence: Synthetic gluten; inner sequence
cggaacagagagccgaagatacagtgtcac

SEQ ID NO: 40177 - DNA, 30 bp, Artificial Sequence; identical to SEQ ID NO: 28586
  Description of Artificial Sequence: Synthetic gluten; inner sequence

SEQ ID NO: 40178 - DNA, 30 bp, Artificial Sequence; identical to SEQ ID NO: 4591
  Description of Artificial Sequence: Synthetic gluten; inner sequence

SEQ ID NO: 40179 - DNA, 30 bp, Artificial Sequence
  Description of Artificial Sequence: Synthetic gluten; inner sequence
gtacgcaatcgttacctagcaagctgggca

SEQ ID NO: 40180 - DNA, 30 bp, Artificial Sequence
  Description of Artificial Sequence: Synthetic gluten; inner sequence
caacaaaccggcactagatattggctcacg

SEQ ID NO: 40181 - DNA, 30 bp, Artificial Sequence
  Description of Artificial Sequence: Synthetic gluten; inner sequence
ggacgaaatgcccgaaagtgcgtcaacgta

SEQ ID NO: 40182 - DNA, 30 bp, Artificial Sequence
  Description of Artificial Sequence: Synthetic gluten; inner sequence
gaacggcgcgacctatcaggtgagcatgga

SEQ ID NO: 40183 - DNA, 30 bp, Artificial Sequence; identical to SEQ ID NO: 208
  Description of Artificial Sequence: Synthetic gluten; inner sequence

SEQ ID NO: 40184 - DNA, 30 bp, Artificial Sequence
  Description of Artificial Sequence: Synthetic gluten; inner sequence
tggactgaacgaaccgaatcatgatgcgca

SEQ ID NO: 40185 - DNA, 30 bp, Artificial Sequence; identical to SEQ ID NO: 20
  Description of Artificial Sequence: Synthetic gluten; inner sequence

SEQ ID NO: 40186 - DNA, 30 bp, Artificial Sequence; identical to SEQ ID NO: 740
  Description of Artificial Sequence: Synthetic gluten; inner sequence

SEQ ID NO: 40187 - DNA, 30 bp, Artificial Sequence; identical to SEQ ID NO: 36552
  Description of Artificial Sequence: Synthetic gluten; inner sequence

SEQ ID NO: 40188 - DNA, 30 bp, Artificial Sequence
  Description of Artificial Sequence: Synthetic gluten; inner sequence
aatacgtccgaatctggatgtgcgaatgta

SEQ ID NO: 40189 - DNA, 30 bp, Artificial Sequence
  Description of Artificial Sequence: Synthetic gluten; inner sequence
gaccaagcgatacctagcaagtgtggaatg

SEQ ID NO: 40190 - DNA, 30 bp, Artificial Sequence; identical to SEQ ID NO: 28849
  Description of Artificial Sequence: Synthetic gluten; inner sequence

SEQ ID NO: 40191 - DNA, 30 bp, Artificial Sequence
  Description of Artificial Sequence: Synthetic gluten; inner sequence
gaccgagcgacctatagagcatgcacttgc

SEQ ID NO: 40192 - DNA, 30 bp, Artificial Sequence; identical to SEQ ID NO: 28452
  Description of Artificial Sequence: Synthetic gluten; inner sequence

SEQ ID NO: 40193 - DNA, 30 bp, Artificial Sequence; identical to SEQ ID NO: 4
  Description of Artificial Sequence: Synthetic gluten; inner sequence

SEQ ID NO: 40194 - DNA, 30 bp, Artificial Sequence
  Description of Artificial Sequence: Synthetic gluten; inner sequence
gtacgatgcgaccgaagtgatcacagcagc

SEQ ID NO: 40195 - DNA, 30 bp, Artificial Sequence
  Description of Artificial Sequence: Synthetic gluten; inner sequence
gacattcgctgaacgttcaagggacgtgga

SEQ ID NO: 40196 - DNA, 30 bp, Artificial Sequence
  Description of Artificial Sequence: Synthetic gluten; inner sequence
gacgcctcgtaccctgaaagtgcgagtgta

SEQ ID NO: 40197 - DNA, 30 bp, Artificial Sequence
  Description of Artificial Sequence: Synthetic gluten; inner sequence
ggcatgcgctgggcagtgatcacgtacggt

SEQ ID NO: 40198 - DNA, 30 bp, Artificial Sequence
  Description of Artificial Sequence: Synthetic gluten; inner sequence
catgctcgtaacacagacaaacagttcata

SEQ ID NO: 40199 - DNA, 30 bp, Artificial Sequence; identical to SEQ ID NO: 346
  Description of Artificial Sequence: Synthetic gluten; inner sequence

SEQ ID NO: 40200 - DNA, 30 bp, Artificial Sequence
  Description of Artificial Sequence: Synthetic gluten; inner sequence
tggccgatcgaccctatcaagtgcagcacg

SEQ ID NO: 40201 - DNA, 30 bp, Artificial Sequence
  Description of Artificial Sequence: Synthetic gluten; inner sequence
ggcctgagctggcattgcgctggacatgta

SEQ ID NO: 40202 - DNA, 30 bp, Artificial Sequence; identical to SEQ ID NO: 36873
  Description of Artificial Sequence: Synthetic gluten; inner sequence

SEQ ID NO: 40203 - DNA, 30 bp, Artificial Sequence; identical to SEQ ID NO: 16949
  Description of Artificial Sequence: Synthetic gluten; inner sequence

SEQ ID NO: 40204 - DNA, 30 bp, Artificial Sequence
  Description of Artificial Sequence: Synthetic gluten; inner sequence
tcgacgcagtcaaacgcatatgacgcactc

SEQ ID NO: 40205 - DNA, 30 bp, Artificial Sequence; identical to SEQ ID NO: 36878
  Description of Artificial Sequence: Synthetic gluten; inner sequence

SEQ ID NO: 40206 - DNA, 30 bp, Artificial Sequence
  Description of Artificial Sequence: Synthetic gluten; inner sequence
catgtacgatcaggaaagcggttcgtcata

SEQ ID NO: 40207 - DNA, 30 bp, Artificial Sequence
  Description of Artificial Sequence: Synthetic gluten; inner sequence
cattcgatgagctagcgagtgccgtggacc

SEQ ID NO: 40208 - DNA, 30 bp, Artificial Sequence
  Description of Artificial Sequence: Synthetic gluten; inner sequence
gacttcgatgaccgacatgtaacagtctta

SEQ ID NO: 40209 - DNA, 30 bp, Artificial Sequence
  Description of Artificial Sequence: Synthetic gluten; inner sequence
cgataccatagagccgaagatcagtgcacg

SEQ ID NO: 40210 - DNA, 30 bp, Artificial Sequence
  Description of Artificial Sequence: Synthetic gluten; inner sequence
tgcatcacatgaaagcataggtcctgtggg

SEQ ID NO: 40211 - DNA, 30 bp, Artificial Sequence
  Description of Artificial Sequence: Synthetic gluten; inner sequence
agattggcatgatctgaccgaaagtgcgtc

SEQ ID NO: 40212 - DNA, 30 bp, Artificial Sequence
  Description of Artificial Sequence: Synthetic gluten; inner sequence
tgtcctgaacgaccctatttgacctgcgca

SEQ ID NO: 40213 - DNA, 30 bp, Artificial Sequence
  Description of Artificial Sequence: Synthetic gluten; inner sequence
catgtgtccgaagcttcacgtatgtcagca

SEQ ID NO: 40214 - DNA, 30 bp, Artificial Sequence; identical to SEQ ID NO: 36384
  Description of Artificial Sequence: Synthetic gluten; inner sequence

SEQ ID NO: 40215 - DNA, 30 bp, Artificial Sequence; identical to SEQ ID NO: 18
  Description of Artificial Sequence: Synthetic gluten; inner sequence

SEQ ID NO: 40216 - DNA, 30 bp, Artificial Sequence; identical to SEQ ID NO: 686
  Description of Artificial Sequence: Synthetic gluten; inner sequence

SEQ ID NO: 40217 - DNA, 30 bp, Artificial Sequence; identical to SEQ ID NO: 8922
  Description of Artificial Sequence: Synthetic gluten; inner sequence

SEQ ID NO: 40218 - DNA, 30 bp, Artificial Sequence
  Description of Artificial Sequence: Synthetic gluten; inner sequence
gtactgagcgaaccgcatcgtgatcatgga

SEQ ID NO: 40219 - DNA, 30 bp, Artificial Sequence
  Description of Artificial Sequence: Synthetic gluten; inner sequence
agcatgtcggacgatggatgtgagcatgta

SEQ ID NO: 40220 - DNA, 30 bp, Artificial Sequence; identical to SEQ ID NO: 36974
  Description of Artificial Sequence: Synthetic gluten; inner sequence

SEQ ID NO: 40221 - DNA, 30 bp, Artificial Sequence
  Description of Artificial Sequence: Synthetic gluten; inner sequence
gtacgacgcggaccctatcaagacggcatg

SEQ ID NO: 40222 - DNA, 30 bp, Artificial Sequence; identical to SEQ ID NO: 54
  Description of Artificial Sequence: Synthetic gluten; inner sequence

SEQ ID NO: 40223 - DNA, 30 bp, Artificial Sequence; identical to SEQ ID NO: 36839
  Description of Artificial Sequence: Synthetic gluten; inner sequence

SEQ ID NO: 40224 - DNA, 30 bp, Artificial Sequence
  Description of Artificial Sequence: Synthetic gluten; inner sequence
ggactgcgatggaatgtgcgaatgtacgca

SEQ ID NO: 40225 - DNA, 30 bp, Artificial Sequence
  Description of Artificial Sequence: Synthetic gluten; inner sequence
ccgtgaggacgcaaggttgatgtaagagtc

SEQ ID NO: 40226 - DNA, 30 bp, Artificial Sequence
  Description of Artificial Sequence: Synthetic gluten; inner sequence
ccgaacgacctgtcacgtctaggcaacaca

SEQ ID NO: 40227 - DNA, 30 bp, Artificial Sequence
  Description of Artificial Sequence: Synthetic gluten; inner sequence
catggctaacaaagggcgactgagctcata

SEQ ID NO: 40228 - DNA, 30 bp, Artificial Sequence
  Description of Artificial Sequence: Synthetic gluten; inner sequence
gtactgcgcgaacgatcgagtgggcctgga

SEQ ID NO: 40229 - DNA, 30 bp, Artificial Sequence
  Description of Artificial Sequence: Synthetic gluten; inner sequence
gtctgacgaggacctgagagtgcgcatgta

SEQ ID NO: 40230 - DNA, 30 bp, Artificial Sequence
  Description of Artificial Sequence: Synthetic gluten; inner sequence
ccgtagcgtcacctatcatgtggccaggta

SEQ ID NO: 40231 - DNA, 30 bp, Artificial Sequence
  Description of Artificial Sequence: Synthetic gluten; inner sequence
ggcctgcgagtacctacgagtgatcaggta

SEQ ID NO: 40232 - DNA, 30 bp, Artificial Sequence; identical to SEQ ID NO: 79
  Description of Artificial Sequence: Synthetic gluten; inner sequence

SEQ ID NO: 40233 - DNA, 30 bp, Artificial Sequence; identical to SEQ ID NO: 389
  Description of Artificial Sequence: Synthetic gluten; inner sequence

SEQ ID NO: 40234 - DNA, 30 bp, Artificial Sequence; identical to SEQ ID NO: 28298
  Description of Artificial Sequence: Synthetic gluten; inner sequence

SEQ ID NO: 40235 - DNA, 30 bp, Artificial Sequence; identical to SEQ ID NO: 310
  Description of Artificial Sequence: Synthetic gluten; inner sequence

SEQ ID NO: 40236 - DNA, 30 bp, Artificial Sequence
  Description of Artificial Sequence: Synthetic gluten; inner sequence
gcgtgcaccctttagcagcttgcgtcaaca

SEQ ID NO: 40237 - DNA, 30 bp, Artificial Sequence; identical to SEQ ID NO: 61
  Description of Artificial Sequence: Synthetic gluten; inner sequence

SEQ ID NO: 40238 - DNA, 30 bp, Artificial Sequence; identical to SEQ ID NO: 111
  Description of Artificial Sequence: Synthetic gluten; inner sequence

SEQ ID NO: 40239 - DNA, 30 bp, Artificial Sequence
  Description of Artificial Sequence: Synthetic gluten; inner sequence
tcagagccgaagaccaggcataacgaagta

SEQ ID NO: 40240 - DNA, 30 bp, Artificial Sequence
  Description of Artificial Sequence: Synthetic gluten; inner sequence
ggactgagctggatgtggctgcactagtgt

SEQ ID NO: 40241 - DNA, 30 bp, Artificial Sequence
  Description of Artificial Sequence: Synthetic gluten; inner sequence
acgtacgtgctgaacgaccttcaagggaca

SEQ ID NO: 40242 - DNA, 30 bp, Artificial Sequence
  Description of Artificial Sequence: Synthetic gluten; inner sequence
agtatgacatcgcgaccctacgagtggaca

SEQ ID NO: 40243 - DNA, 30 bp, Artificial Sequence
  Description of Artificial Sequence: Synthetic gluten; inner sequence
catggccgagcggagataagcttgcagcta

SEQ ID NO: 40244 - DNA, 30 bp, Artificial Sequence; identical to SEQ ID NO: 67
  Description of Artificial Sequence: Synthetic gluten; inner sequence

SEQ ID NO: 40245 - DNA, 30 bp, Artificial Sequence
  Description of Artificial Sequence: Synthetic gluten; inner sequence
tagcacagcacatcacgagatatcgcgcac

SEQ ID NO: 40246 - DNA, 30 bp, Artificial Sequence
  Description of Artificial Sequence: Synthetic gluten; inner sequence
cttcccgtcaggcaggcattgcacgcaggc

SEQ ID NO: 40247 - DNA, 30 bp, Artificial Sequence
  Description of Artificial Sequence: Synthetic gluten; inner sequence
ggcctgcgatgaccggtctgtataggcaat

SEQ ID NO: 40248 - DNA, 30 bp, Artificial Sequence
  Description of Artificial Sequence: Synthetic gluten; inner sequence
ggccggcgatggatgtgaaatggcttgtct

SEQ ID NO: 40249 - DNA, 30 bp, Artificial Sequence
  Description of Artificial Sequence: Synthetic gluten; inner sequence
tggactgcgagtcacacaagtgcatgtcta

SEQ ID NO: 40250 - DNA, 30 bp, Artificial Sequence
  Description of Artificial Sequence: Synthetic gluten; inner sequence
cgtacatgagtggcgacatcccctttgtca

SEQ ID NO: 40251 - DNA, 30 bp, Artificial Sequence; identical to SEQ ID NO: 8950
  Description of Artificial Sequence: Synthetic gluten; inner sequence

SEQ ID NO: 40252 - DNA, 30 bp, Artificial Sequence; identical to SEQ ID NO: 4592
  Description of Artificial Sequence: Synthetic gluten; inner sequence

SEQ ID NO: 40253 - DNA, 30 bp, Artificial Sequence
  Description of Artificial Sequence: Synthetic gluten; inner sequence
gtacgtcgaggccctacaagtgagagggta

SEQ ID NO: 40254 - DNA, 30 bp, Artificial Sequence; identical to SEQ ID NO: 548
  Description of Artificial Sequence: Synthetic gluten; inner sequence

SEQ ID NO: 40255 - DNA, 30 bp, Artificial Sequence
  Description of Artificial Sequence: Synthetic gluten; inner sequence
tgtccgacgcgaccatatcaagtgcatgga

SEQ ID NO: 40256 - DNA, 30 bp, Artificial Sequence
  Description of Artificial Sequence: Synthetic gluten; inner sequence
catggccgagagaagctacactaaggcaca

SEQ ID NO: 40257 - DNA, 29 bp, Artificial Sequence
  Description of Artificial Sequence: Synthetic gluten; inner sequence
gacgcactctaccctacatgcactacgtc

SEQ ID NO: 40258 - DNA, 30 bp, Artificial Sequence; identical to SEQ ID NO: 8682
  Description of Artificial Sequence: Synthetic gluten; inner sequence

SEQ ID NO: 40259 - DNA, 30 bp, Artificial Sequence
  Description of Artificial Sequence: Synthetic gluten; inner sequence
cgcaccctatcacgtggaagtgaacttggc

SEQ ID NO: 40260 - DNA, 25 bp, Artificial Sequence
  Description of Artificial Sequence: Synthetic gluten; inner sequence
ggcctgcgatggatgtgtgcatgta

SEQ ID NO: 40261 - DNA, 30 bp, Artificial Sequence
  Description of Artificial Sequence: Synthetic gluten; inner sequence
catgtcgagaccagtgcactttgcagcata

SEQ ID NO: 40262 - DNA, 30 bp, Artificial Sequence
  Description of Artificial Sequence: Synthetic gluten; inner sequence
caaccgactgcaagtaccatatggctcacg

SEQ ID NO: 40263 - DNA, 30 bp, Artificial Sequence
  Description of Artificial Sequence: Synthetic gluten; inner sequence
ggcctgatcgaacctagcgagtggcgtgga

SEQ ID NO: 40264 - DNA, 30 bp, Artificial Sequence
  Description of Artificial Sequence: Synthetic gluten; inner sequence
caacaaatcgcggactcgtaatgtctcacg

SEQ ID NO: 40265 - DNA, 30 bp, Artificial Sequence; identical to SEQ ID NO: 48
  Description of Artificial Sequence: Synthetic gluten; inner sequence

SEQ ID NO: 40266 - DNA, 30 bp, Artificial Sequence
  Description of Artificial Sequence: Synthetic gluten; inner sequence
cctccgaggcagctatctcatggacgcgaa

SEQ ID NO: 40267 - DNA, 30 bp, Artificial Sequence
  Description of Artificial Sequence: Synthetic gluten; inner sequence
gacgacgatgacctagtaatggacgtgttc

SEQ ID NO: 40268 - DNA, 30 bp, Artificial Sequence
  Description of Artificial Sequence: Synthetic gluten; inner sequence
cgggaggctgaaaggaacagttcacgcaac

SEQ ID NO: 40269 - DNA, 30 bp, Artificial Sequence
  Description of Artificial Sequence: Synthetic gluten; inner sequence
ggccgcggcttccctgaaatggacgcagcg

SEQ ID NO: 40270 - DNA, 30 bp, Artificial Sequence; identical to SEQ ID NO: 76
  Description of Artificial Sequence: Synthetic gluten; inner sequence

SEQ ID NO: 40271 - DNA, 30 bp, Artificial Sequence; identical to SEQ ID NO: 154
  Description of Artificial Sequence: Synthetic gluten; inner sequence

SEQ ID NO: 40272 - DNA, 30 bp, Artificial Sequence
  Description of Artificial Sequence: Synthetic gluten; inner sequence
ggactgcgatgagctcaaggggagcatgga

SEQ ID NO: 40273 - DNA, 30 bp, Artificial Sequence
  Description of Artificial Sequence: Synthetic gluten; inner sequence
aatgtggacggctcgaaccctagctaggca

SEQ ID NO: 40274 - DNA, 30 bp, Artificial Sequence
  Description of Artificial Sequence: Synthetic gluten; inner sequence
gacagcgcagatgaagaatacgacgactct

SEQ ID NO: 40275 - DNA, 30 bp, Artificial Sequence
  Description of Artificial Sequence: Synthetic gluten; inner sequence
catgacgcagtaagcacgtatcgtggcata

SEQ ID NO: 40276 - DNA, 30 bp, Artificial Sequence
  Description of Artificial Sequence: Synthetic gluten; inner sequence
gtcatgcacagaccggtaagtgctcaggta

SEQ ID NO: 40277 - DNA, 30 bp, Artificial Sequence; identical to SEQ ID NO: 4552
  Description of Artificial Sequence: Synthetic gluten; inner sequence

SEQ ID NO: 40278 - DNA, 30 bp, Artificial Sequence; identical to SEQ ID NO: 362
  Description of Artificial Sequence: Synthetic gluten; inner sequence

SEQ ID NO: 40279 - DNA, 30 bp, Artificial Sequence; identical to SEQ ID NO: 850
  Description of Artificial Sequence: Synthetic gluten; inner sequence

SEQ ID NO: 40280 - DNA, 30 bp, Artificial Sequence
  Description of Artificial Sequence: Synthetic gluten; inner sequence
cgaacacgcacgtgctttgaggactagagg

SEQ ID NO: 40281 - DNA, 30 bp, Artificial Sequence
  Description of Artificial Sequence: Synthetic gluten; inner sequence
ggcatgcgctgggaagtgatcacgtacggt

SEQ ID NO: 40282 - DNA, 30 bp, Artificial Sequence
  Description of Artificial Sequence: Synthetic gluten; inner sequence
gcactgagcgaacccttgtcatgggacgta

SEQ ID NO: 40283 - DNA, 30 bp, Artificial Sequence
  Description of Artificial Sequence: Synthetic gluten; inner sequence
caatcacatggtgcggactgatggttcaag

SEQ ID NO: 40284 - DNA, 30 bp, Artificial Sequence
  Description of Artificial Sequence: Synthetic gluten; inner sequence
ggcccgacgacccttcaagtgaccatcgta

SEQ ID NO: 40285 - DNA, 30 bp, Artificial Sequence
  Description of Artificial Sequence: Synthetic gluten; inner sequence
gtcatgcactgatccgacaatgggcgtgaa

SEQ ID NO: 40286 - DNA, 30 bp, Artificial Sequence; identical to SEQ ID NO: 355
  Description of Artificial Sequence: Synthetic gluten; inner sequence

SEQ ID NO: 40287 - DNA, 30 bp, Artificial Sequence
  Description of Artificial Sequence: Synthetic gluten; inner sequence
catgttcggaccagagcggtctccggcata

SEQ ID NO: 40288 - DNA, 30 bp, Artificial Sequence
  Description of Artificial Sequence: Synthetic gluten; inner sequence
ggcattcgacctgcctatcaagggtgctca

SEQ ID NO: 40289 - DNA, 30 bp, Artificial Sequence
  Description of Artificial Sequence: Synthetic gluten; inner sequence
tgctagtgcaagcagagggcattcgaaggg

SEQ ID NO: 40290 - DNA, 30 bp, Artificial Sequence
  Description of Artificial Sequence: Synthetic gluten; inner sequence
ggactgatcaaccctaagcatgtggcgatg

SEQ ID NO: 40291 - DNA, 30 bp, Artificial Sequence
  Description of Artificial Sequence: Synthetic gluten; inner sequence
gcgagcggacctaaagaacatgtcgttggc

SEQ ID NO: 40292 - DNA, 30 bp, Artificial Sequence
  Description of Artificial Sequence: Synthetic gluten; inner sequence
agtcacaggaagcaccggaccgattcgtca

SEQ ID NO: 40293 - DNA, 30 bp, Artificial Sequence
  Description of Artificial Sequence: Synthetic gluten; inner sequence
ccgaaccgacatgctaatgaagtgtacgta

SEQ ID NO: 40294 - DNA, 30 bp, Artificial Sequence
  Description of Artificial Sequence: Synthetic gluten; inner sequence
gcaacgcagcatggacgaatctggatgtgg

SEQ ID NO: 40295 - DNA, 30 bp, Artificial Sequence
  Description of Artificial Sequence: Synthetic gluten; inner sequence
ggcatgatcgaacctagagagtggcgtgga

SEQ ID NO: 40296 - DNA, 30 bp, Artificial Sequence
  Description of Artificial Sequence: Synthetic gluten; inner sequence
gtcatgcgcggacattcaagctggcgtgga

SEQ ID NO: 40297 - DNA, 30 bp, Artificial Sequence
  Description of Artificial Sequence: Synthetic gluten; inner sequence
ggactgatcgaacctagagagtggcgtgga

SEQ ID NO: 40298 - DNA, 30 bp, Artificial Sequence
  Description of Artificial Sequence: Synthetic gluten; inner sequence
catgtgcgatcagagcggtgcaccggcata

SEQ ID NO: 40299 - DNA, 30 bp, Artificial Sequence
  Description of Artificial Sequence: Synthetic gluten; inner sequence
accgtcaggcagaagaggactgagcgcaca

SEQ ID NO: 40300 - DNA, 30 bp, Artificial Sequence; identical to SEQ ID NO: 329
  Description of Artificial Sequence: Synthetic gluten; inner sequence

SEQ ID NO: 40301 - DNA, 30 bp, Artificial Sequence
  Description of Artificial Sequence: Synthetic gluten; inner sequence
tcgcatatggctacgatgaccgatgtgggc

SEQ ID NO: 40302 - DNA, 30 bp, Artificial Sequence
  Description of Artificial Sequence: Synthetic gluten; inner sequence
cgcaacgcctcttggtgcatcgccatgtct

SEQ ID NO: 40303 - DNA, 30 bp, Artificial Sequence; identical to SEQ ID NO: 30
  Description of Artificial Sequence: Synthetic gluten; inner sequence

SEQ ID NO: 40304 - DNA, 25 bp, Artificial Sequence
  Description of Artificial Sequence: Synthetic gluten; inner sequence
ggcatgcgatggatgtgtgcgtgta

SEQ ID NO: 40305 - DNA, 30 bp, Artificial Sequence
  Description of Artificial Sequence: Synthetic gluten; inner sequence
actcccctagcatgagtgggctatgaagca

SEQ ID NO: 40306 - DNA, 30 bp, Artificial Sequence
  Description of Artificial Sequence: Synthetic gluten; inner sequence
ccgatcgaagctaaagagcatgaacgtggc

SEQ ID NO: 40307 - DNA, 30 bp, Artificial Sequence; identical to SEQ ID NO: 800
  Description of Artificial Sequence: Synthetic gluten; inner sequence

SEQ ID NO: 40308 - DNA, 30 bp, Artificial Sequence
  Description of Artificial Sequence: Synthetic gluten; inner sequence
catgtacgaccgcaaaggctcagctcaata

SEQ ID NO: 40309 - DNA, 30 bp, Artificial Sequence
  Description of Artificial Sequence: Synthetic gluten; inner sequence
ggacttcgcgaacttcatggctggcatcca

SEQ ID NO: 40310 - DNA, 30 bp, Artificial Sequence; identical to SEQ ID NO: 36617
  Description of Artificial Sequence: Synthetic gluten; inner sequence

SEQ ID NO: 40311 - DNA, 30 bp, Artificial Sequence
  Description of Artificial Sequence: Synthetic gluten; inner sequence
ggacgaagcttccctgctactacgtcacga

SEQ ID NO: 40312 - DNA, 30 bp, Artificial Sequence
  Description of Artificial Sequence: Synthetic gluten; inner sequence
ggccgacgatggatgtagttatggaccagc

SEQ ID NO: 40313 - DNA, 30 bp, Artificial Sequence
  Description of Artificial Sequence: Synthetic gluten; inner sequence
ccgcactctggatgggtcacgcacgagtca

SEQ ID NO: 40314 - DNA, 30 bp, Artificial Sequence
  Description of Artificial Sequence: Synthetic gluten; inner sequence
aatacgcccgaccttacctacacgtgatca

SEQ ID NO: 40315 - DNA, 30 bp, Artificial Sequence
  Description of Artificial Sequence: Synthetic gluten; inner sequence
ccatatggcaggcgattaccgatgtgcgta

SEQ ID NO: 40316 - DNA, 30 bp, Artificial Sequence; identical to SEQ ID NO: 36722
  Description of Artificial Sequence: Synthetic gluten; inner sequence

SEQ ID NO: 40317 - DNA, 30 bp, Artificial Sequence
  Description of Artificial Sequence: Synthetic gluten; inner sequence
acgtcacgggtaacaagcttgccaattgtg

SEQ ID NO: 40318 - DNA, 30 bp, Artificial Sequence
  Description of Artificial Sequence: Synthetic gluten; inner sequence
cccagaatcacaacaaacgtgcacgctagc

SEQ ID NO: 40319 - DNA, 30 bp, Artificial Sequence
  Description of Artificial Sequence: Synthetic gluten; inner sequence
catgtacgacagaggtgcagagcagacata

SEQ ID NO: 40320 - DNA, 30 bp, Artificial Sequence
  Description of Artificial Sequence: Synthetic gluten; inner sequence
ggactgaacgagatctggcttgcaataggc

SEQ ID NO: 40321 - DNA, 30 bp, Artificial Sequence
  Description of Artificial Sequence: Synthetic gluten; inner sequence
agtatggcctgcgatggatcgacgttcaca

SEQ ID NO: 40322 - DNA, 30 bp, Artificial Sequence; identical to SEQ ID NO: 81
  Description of Artificial Sequence: Synthetic gluten; inner sequence

SEQ ID NO: 40323 - DNA, 30 bp, Artificial Sequence
  Description of Artificial Sequence: Synthetic gluten; inner sequence
gacgccacgcagcctaatcgtgatcatgta

SEQ ID NO: 40324 - DNA, 30 bp, Artificial Sequence; identical to SEQ ID NO: 392
  Description of Artificial Sequence: Synthetic gluten; inner sequence

SEQ ID NO: 40325 - DNA, 30 bp, Artificial Sequence
  Description of Artificial Sequence: Synthetic gluten; inner sequence
tcagatggcatgaacggcatgacgacgtga

SEQ ID NO: 40326 - DNA, 30 bp, Artificial Sequence
  Description of Artificial Sequence: Synthetic gluten; inner sequence
gcatgacggacttgaacgatctcctttggc

SEQ ID NO: 40327 - DNA, 30 bp, Artificial Sequence; identical to SEQ ID NO: 28644
  Description of Artificial Sequence: Synthetic gluten; inner sequence

SEQ ID NO: 40328 - DNA, 30 bp, Artificial Sequence
  Description of Artificial Sequence: Synthetic gluten; inner sequence
acatacgtacgaacgacctcaatgtgcgtc

SEQ ID NO: 40329 - DNA, 30 bp, Artificial Sequence
  Description of Artificial Sequence: Synthetic gluten; inner sequence
tctgcatggcctgaacgatccgtgccgtca

SEQ ID NO: 40330 - DNA, 29 bp, Artificial Sequence
  Description of Artificial Sequence: Synthetic gluten; inner sequence
ggccgatcgaccctatcaagtgcagcatg

SEQ ID NO: 40331 - DNA, 30 bp, Artificial Sequence
  Description of Artificial Sequence: Synthetic gluten; inner sequence
gtacgccgctccatcccttcaaggcagtca

SEQ ID NO: 40332 - DNA, 30 bp, Artificial Sequence
  Description of Artificial Sequence: Synthetic gluten; inner sequence
cgccacgaaaccgtaaggttcagcaagtca

SEQ ID NO: 40333 - DNA, 30 bp, Artificial Sequence; identical to SEQ ID NO: 12933
  Description of Artificial Sequence: Synthetic gluten; inner sequence

SEQ ID NO: 40334 - DNA, 30 bp, Artificial Sequence
  Description of Artificial Sequence: Synthetic gluten; inner sequence
ctgagtgaggacccaaggttgagtactgcc

SEQ ID NO: 40335 - DNA, 30 bp, Artificial Sequence
  Description of Artificial Sequence: Synthetic gluten; inner sequence
cgtaccgacgtaaggagaaaggtatgggtt

SEQ ID NO: 40336 - DNA, 30 bp, Artificial Sequence
  Description of Artificial Sequence: Synthetic gluten; inner sequence
catcgtacggacgaaagcgttaacggcata

SEQ ID NO: 40337 - DNA, 30 bp, Artificial Sequence
  Description of Artificial Sequence: Synthetic gluten; inner sequence
ggccacgatgaacctacaggtgatcatgta

SEQ ID NO: 40338 - DNA, 30 bp, Artificial Sequence
  Description of Artificial Sequence: Synthetic gluten; inner sequence
ggcctgatcgcacctagagagtggcgtgga

SEQ ID NO: 40339 - DNA, 30 bp, Artificial Sequence
  Description of Artificial Sequence: Synthetic gluten; inner sequence
gaccgccactccctagcaagcgcgaatgta

SEQ ID NO: 40340 - DNA, 30 bp, Artificial Sequence
  Description of Artificial Sequence: Synthetic gluten; inner sequence
catgactaaccatctgacggacagttcata

SEQ ID NO: 40341 - DNA, 30 bp, Artificial Sequence
  Description of Artificial Sequence: Synthetic gluten; inner sequence
gagttcgcgatccttcaagtgcagcatgga

SEQ ID NO: 40342 - DNA, 30 bp, Artificial Sequence
  Description of Artificial Sequence: Synthetic gluten; inner sequence
tcaatatcggcactcgcatgaaagttccgt

SEQ ID NO: 40343 - DNA, 30 bp, Artificial Sequence
  Description of Artificial Sequence: Synthetic gluten; inner sequence
ggccgaaagctaagctagttaatggacaca

SEQ ID NO: 40344 - DNA, 30 bp, Artificial Sequence; identical to SEQ ID NO: 21
  Description of Artificial Sequence: Synthetic gluten; inner sequence

SEQ ID NO: 40345 - DNA, 30 bp, Artificial Sequence
  Description of Artificial Sequence: Synthetic gluten; inner sequence
ggccgaacgacatgatgcgtatggaaagta

SEQ ID NO: 40346 - DNA, 30 bp, Artificial Sequence
  Description of Artificial Sequence: Synthetic gluten; inner sequence
gtcatgcgcggacattcaagttggcgcgga

SEQ ID NO: 40347 - DNA, 30 bp, Artificial Sequence
  Description of Artificial Sequence: Synthetic gluten; inner sequence
cctgagcgcacccaacaatggcatggcgaa

SEQ ID NO: 40348 - DNA, 30 bp, Artificial Sequence
  Description of Artificial Sequence: Synthetic gluten; inner sequence
ggacggagcgaccgaaatggctagtcacgt

SEQ ID NO: 40349 - DNA, 30 bp, Artificial Sequence
  Description of Artificial Sequence: Synthetic gluten; inner sequence
tggaacgccgaataaaaggtgagatcgtgc

SEQ ID NO: 40350 - DNA, 30 bp, Artificial Sequence; identical to SEQ ID NO: 567
  Description of Artificial Sequence: Synthetic gluten; inner sequence

SEQ ID NO: 40351 - DNA, 30 bp, Artificial Sequence
  Description of Artificial Sequence: Synthetic gluten; inner sequence
ggcctgatcgaacctcgagagtggcgtgga

SEQ ID NO: 40352 - DNA, 29 bp, Artificial Sequence
  Description of Artificial Sequence: Synthetic gluten; inner sequence
catacagccgcagtttcggaccttcagcc

SEQ ID NO: 40353 - DNA, 30 bp, Artificial Sequence
  Description of Artificial Sequence: Synthetic gluten; inner sequence
ccgactcgaccaaagtaggagtgtacgtgt

SEQ ID NO: 40354 - DNA, 30 bp, Artificial Sequence
  Description of Artificial Sequence: Synthetic gluten; inner sequence
cgacacgacgtatcgttagcttcgcggtca

SEQ ID NO: 40355 - DNA, 30 bp, Artificial Sequence; identical to SEQ ID NO: 28295
  Description of Artificial Sequence: Synthetic gluten; inner sequence

SEQ ID NO: 40356 - DNA, 25 bp, Artificial Sequence
  Description of Artificial Sequence: Synthetic gluten; inner sequence
ggccgacgatggatgtgagcatgta

SEQ ID NO: 40357 - DNA, 30 bp, Artificial Sequence; identical to SEQ ID NO: 813
  Description of Artificial Sequence: Synthetic gluten; inner sequence

SEQ ID NO: 40358 - DNA, 30 bp, Artificial Sequence; identical to SEQ ID NO: 783
  Description of Artificial Sequence: Synthetic gluten; inner sequence

SEQ ID NO: 40359 - DNA, 30 bp, Artificial Sequence
  Description of Artificial Sequence: Synthetic gluten; inner sequence
cgcgcctatcaacgtgccaggtacgacgaa

SEQ ID NO: 40360 - DNA, 30 bp, Artificial Sequence
  Description of Artificial Sequence: Synthetic gluten; inner sequence
ggcctgaactggatgtgcggaaggtacgag

SEQ ID NO: 40361 - DNA, 30 bp, Artificial Sequence
  Description of Artificial Sequence: Synthetic gluten; inner sequence
cattcacatggccgtcgatggatctgggca

SEQ ID NO: 40362 - DNA, 30 bp, Artificial Sequence
  Description of Artificial Sequence: Synthetic gluten; inner sequence
tggccgaacttccctaaagaccagcactag

SEQ ID NO: 40363 - DNA, 30 bp, Artificial Sequence
  Description of Artificial Sequence: Synthetic gluten; inner sequence
ggacgacgcgagctagcaaggaggcgtgta

SEQ ID NO: 40364 - DNA, 30 bp, Artificial Sequence
  Description of Artificial Sequence: Synthetic gluten; inner sequence
ggccgacgaagaccttaaagtgatcgtgta

SEQ ID NO: 40365 - DNA, 30 bp, Artificial Sequence
  Description of Artificial Sequence: Synthetic gluten; inner sequence
gtcatgcgcggacattcaaggtggcgtgga

SEQ ID NO: 40366 - DNA, 30 bp, Artificial Sequence
  Description of Artificial Sequence: Synthetic gluten; inner sequence
catgacggaacgtagctcggcagagtcata

SEQ ID NO: 40367 - DNA, 30 bp, Artificial Sequence
  Description of Artificial Sequence: Synthetic gluten; inner sequence
gcccgagcgaacctagcatgtgggatcgta

SEQ ID NO: 40368 - DNA, 31 bp, Artificial Sequence; identical to SEQ ID NO: 503
  Description of Artificial Sequence: Synthetic gluten; inner sequence

SEQ ID NO: 40369 - DNA, 30 bp, Artificial Sequence
  Description of Artificial Sequence: Synthetic gluten; inner sequence
ggcatgcgatggatgtggaaatgcgacgtc

SEQ ID NO: 40370 - DNA, 30 bp, Artificial Sequence; identical to SEQ ID NO: 288
  Description of Artificial Sequence: Synthetic gluten; inner sequence

SEQ ID NO: 40371 - DNA, 30 bp, Artificial Sequence
  Description of Artificial Sequence: Synthetic gluten; inner sequence
caaactgacagggcaaagctatgtctcacc

SEQ ID NO: 40372 - DNA, 30 bp, Artificial Sequence
  Description of Artificial Sequence: Synthetic gluten; inner sequence
gtacgtctcggatgaggtcttgaacgcggt

SEQ ID NO: 40373 - DNA, 30 bp, Artificial Sequence
  Description of Artificial Sequence: Synthetic gluten; inner sequence
ccgttgatgaccaagagcatgaacgaggca

SEQ ID NO: 40374 - DNA, 30 bp, Artificial Sequence
  Description of Artificial Sequence: Synthetic gluten; inner sequence
ttgagccgaagacacccctacgatcttggg

SEQ ID NO: 40375 - DNA, 30 bp, Artificial Sequence
  Description of Artificial Sequence: Synthetic gluten; inner sequence
tggtcgcactcttcacgtcacaagcggaca

SEQ ID NO: 40376 - DNA, 30 bp, Artificial Sequence
  Description of Artificial Sequence: Synthetic gluten; inner sequence
ggcctgaaaagcgagaaggagcctacaagg

SEQ ID NO: 40377 - DNA, 30 bp, Artificial Sequence
  Description of Artificial Sequence: Synthetic gluten; inner sequence
gccacagcgacctcaagtaggctggacgta

SEQ ID NO: 40378 - DNA, 30 bp, Artificial Sequence; identical to SEQ ID NO: 529
  Description of Artificial Sequence: Synthetic gluten; inner sequence

SEQ ID NO: 40379 - DNA, 30 bp, Artificial Sequence; identical to SEQ ID NO: 504
  Description of Artificial Sequence: Synthetic gluten; inner sequence

SEQ ID NO: 40380 - DNA, 30 bp, Artificial Sequence; identical to SEQ ID NO: 4406
  Description of Artificial Sequence: Synthetic gluten; inner sequence

SEQ ID NO: 40381 - DNA, 30 bp, Artificial Sequence
  Description of Artificial Sequence: Synthetic gluten; inner sequence
gacgctaggaggcctaaatgcgtgaacata

SEQ ID NO: 40382 - DNA, 30 bp, Artificial Sequence
  Description of Artificial Sequence: Synthetic gluten; inner sequence
ggcattcgatgcactacaagctgttgtgta

SEQ ID NO: 40383 - DNA, 30 bp, Artificial Sequence
  Description of Artificial Sequence: Synthetic gluten; inner sequence
catgcatggggagcagtggcttagctgaca

SEQ ID NO: 40384 - DNA, 30 bp, Artificial Sequence
  Description of Artificial Sequence: Synthetic gluten; inner sequence
catgtaccaagagttacgttcaccggcata

SEQ ID NO: 40385 - DNA, 29 bp, Artificial Sequence
  Description of Artificial Sequence: Synthetic gluten; inner sequence
gccctgcgatgaccgaaagtgggttggac

SEQ ID NO: 40386 - DNA, 30 bp, Artificial Sequence; identical to SEQ ID NO: 673
  Description of Artificial Sequence: Synthetic gluten; inner sequence

SEQ ID NO: 40387 - DNA, 30 bp, Artificial Sequence
  Description of Artificial Sequence: Synthetic gluten; inner sequence
ctggccggagagtagctacaaatgtcttca

SEQ ID NO: 40388 - DNA, 30 bp, Artificial Sequence
  Description of Artificial Sequence: Synthetic gluten; inner sequence
tcgggccacctacgcatcatcaacacgtgg

SEQ ID NO: 40389 - DNA, 30 bp, Artificial Sequence
  Description of Artificial Sequence: Synthetic gluten; inner sequence
ggactgcgatggatgaggtgctgcactagt

SEQ ID NO: 40390 - DNA, 30 bp, Artificial Sequence
  Description of Artificial Sequence: Synthetic gluten; inner sequence
aatgtggaatgaacgaccaagagcatggat

SEQ ID NO: 40391 - DNA, 30 bp, Artificial Sequence
  Description of Artificial Sequence: Synthetic gluten; inner sequence
ggcctgaacaaccgatagaacatggcgtaa

SEQ ID NO: 40392 - DNA, 30 bp, Artificial Sequence
  Description of Artificial Sequence: Synthetic gluten; inner sequence
gtcatgcgcggacattcaagatggcgtgga

SEQ ID NO: 40393 - DNA, 30 bp, Artificial Sequence
  Description of Artificial Sequence: Synthetic gluten; inner sequence
cttgcatatgaacgcgctctggatgtgggc

SEQ ID NO: 40394 - DNA, 30 bp, Artificial Sequence
  Description of Artificial Sequence: Synthetic gluten; inner sequence
cattacgtacaaagggcgtgcagactcata

SEQ ID NO: 40395 - DNA, 30 bp, Artificial Sequence
  Description of Artificial Sequence: Synthetic gluten; inner sequence
cttccacccaaagtccttcgagccggtgtc

SEQ ID NO: 40396 - DNA, 30 bp, Artificial Sequence
  Description of Artificial Sequence: Synthetic gluten; inner sequence
ggcctcgaagcccttcaagcggttcatgga

SEQ ID NO: 40397 - DNA, 30 bp, Artificial Sequence
  Description of Artificial Sequence: Synthetic gluten; inner sequence
gtgctgagcttccctaagagtgcttgcgca

SEQ ID NO: 40398 - DNA, 30 bp, Artificial Sequence
  Description of Artificial Sequence: Synthetic gluten; inner sequence
tgaccgactcgaaccaggcatgactcggca

SEQ ID NO: 40399 - DNA, 30 bp, Artificial Sequence
  Description of Artificial Sequence: Synthetic gluten; inner sequence
tggacgacgattcccttggcaagctccgct

SEQ ID NO: 40400 - DNA, 30 bp, Artificial Sequence
  Description of Artificial Sequence: Synthetic gluten; inner sequence
ggactcgcgtcactatcacgggggcaggta

SEQ ID NO: 40401 - DNA, 31 bp, Artificial Sequence
  Description of Artificial Sequence: Synthetic gluten; inner sequence
gtacgacgcgaacctatcaagggctcatgga

SEQ ID NO: 40402 - DNA, 30 bp, Artificial Sequence
  Description of Artificial Sequence: Synthetic gluten; inner sequence
tcgcgatgaccgaggaaatgtacgacggca

SEQ ID NO: 40403 - DNA, 30 bp, Artificial Sequence
  Description of Artificial Sequence: Synthetic gluten; inner sequence
ggcatgatcgaaccgctagtgtgtcaggga

SEQ ID NO: 40404 - DNA, 29 bp, Artificial Sequence
  Description of Artificial Sequence: Synthetic gluten; inner sequence
ggcatgcgatggatgtggctggtgcttgc

SEQ ID NO: 40405 - DNA, 30 bp, Artificial Sequence
  Description of Artificial Sequence: Synthetic gluten; inner sequence
ggcattcgatgcactacaagttgttgcgta

SEQ ID NO: 40406 - DNA, 30 bp, Artificial Sequence
  Description of Artificial Sequence: Synthetic gluten; inner sequence
ccgactcgacctgaatgtaataggagtgaa

SEQ ID NO: 40407 - DNA, 30 bp, Artificial Sequence
  Description of Artificial Sequence: Synthetic gluten; inner sequence
tggcacacaagcatatcgcacttatctgga

SEQ ID NO: 40408 - DNA, 30 bp, Artificial Sequence
  Description of Artificial Sequence: Synthetic gluten; inner sequence
ctgacctagcaactgtggcacgcaatttga

SEQ ID NO: 40409 - DNA, 30 bp, Artificial Sequence
  Description of Artificial Sequence: Synthetic gluten; inner sequence
catgtacccacgatagtcctgaggagcata

SEQ ID NO: 40410 - DNA, 30 bp, Artificial Sequence
  Description of Artificial Sequence: Synthetic gluten; inner sequence
catatggacgccgatgaactagtacgggca

SEQ ID NO: 40411 - DNA, 30 bp, Artificial Sequence
  Description of Artificial Sequence: Synthetic gluten; inner sequence
gtacgacactgcaccttcaagtgtgatgta

SEQ ID NO: 40412 - DNA, 30 bp, Artificial Sequence; identical to SEQ ID NO: 4598
  Description of Artificial Sequence: Synthetic gluten; inner sequence

SEQ ID NO: 40413 - DNA, 30 bp, Artificial Sequence; identical to SEQ ID NO: 4555
  Description of Artificial Sequence: Synthetic gluten; inner sequence

SEQ ID NO: 40414 - DNA, 30 bp, Artificial Sequence
  Description of Artificial Sequence: Synthetic gluten; inner sequence
gacctgatcgaacctagagagtggcgtgga

SEQ ID NO: 40415 - DNA, 30 bp, Artificial Sequence
  Description of Artificial Sequence: Synthetic gluten; inner sequence
ggacgaactgaactaaagtggggtacgacg

SEQ ID NO: 40416 - DNA, 30 bp, Artificial Sequence
  Description of Artificial Sequence: Synthetic gluten; inner sequence
cctgagctgcactaggacggcaattccaaa

SEQ ID NO: 40417 - DNA, 30 bp, Artificial Sequence
  Description of Artificial Sequence: Synthetic gluten; inner sequence
catgtacgctcataaaggctcgcactcata

SEQ ID NO: 40418 - DNA, 30 bp, Artificial Sequence
  Description of Artificial Sequence: Synthetic gluten; inner sequence
ccgtacgattcgctgcaatgtgctcatgga

SEQ ID NO: 40419 - DNA, 30 bp, Artificial Sequence; identical to SEQ ID NO: 112
  Description of Artificial Sequence: Synthetic gluten; inner sequence

SEQ ID NO: 40420 - DNA, 29 bp, Artificial Sequence
  Description of Artificial Sequence: Synthetic gluten; inner sequence
ttcgcagaaagcacgtgatcaacgcgcac

SEQ ID NO: 40421 - DNA, 30 bp, Artificial Sequence
  Description of Artificial Sequence: Synthetic gluten; inner sequence
cgaccctgttgagagccgaagatctgcaat

SEQ ID NO: 40422 - DNA, 30 bp, Artificial Sequence
  Description of Artificial Sequence: Synthetic gluten; inner sequence
gcacgacgatgactgaaagtgtccatgtgc

SEQ ID NO: 40423 - DNA, 30 bp, Artificial Sequence
  Description of Artificial Sequence: Synthetic gluten; inner sequence
tcatatggccaatgacgccctgtacgtgtc

SEQ ID NO: 40424 - DNA, 30 bp, Artificial Sequence
  Description of Artificial Sequence: Synthetic gluten; inner sequence
ggcctgaacgcgcctatcaatgcgtctgta

SEQ ID NO: 40425 - DNA, 30 bp, Artificial Sequence
  Description of Artificial Sequence: Synthetic gluten; inner sequence
tgaagtgacacaagagccgaagatacagta

SEQ ID NO: 40426 - DNA, 30 bp, Artificial Sequence
  Description of Artificial Sequence: Synthetic gluten; inner sequence
gtactgctctggcacgaagatgctgcgtca

SEQ ID NO: 40427 - DNA, 30 bp, Artificial Sequence
  Description of Artificial Sequence: Synthetic gluten; inner sequence
gtgctgcgatgaccgatgaaggcactaggc

SEQ ID NO: 40428 - DNA, 30 bp, Artificial Sequence
  Description of Artificial Sequence: Synthetic gluten; inner sequence
ggccaccctcatcccttgggcatgcacgac

SEQ ID NO: 40429 - DNA, 30 bp, Artificial Sequence
  Description of Artificial Sequence: Synthetic gluten; inner sequence
gactgaacggaaacaagtggaagtggcgtc

SEQ ID NO: 40430 - DNA, 30 bp, Artificial Sequence
  Description of Artificial Sequence: Synthetic gluten; inner sequence
cgtcatgccatagaaatcgtggaccgtgcc

SEQ ID NO: 40431 - DNA, 30 bp, Artificial Sequence
  Description of Artificial Sequence: Synthetic gluten; inner sequence
gtcatgccgtcccgtacaagtcgtcaggga

SEQ ID NO: 40432 - DNA, 30 bp, Artificial Sequence
  Description of Artificial Sequence: Synthetic gluten; inner sequence
tggactcgctgaacctaccaagaacatgtc

SEQ ID NO: 40433 - DNA, 30 bp, Artificial Sequence
  Description of Artificial Sequence: Synthetic gluten; inner sequence
tgtccgaagcaaccggcaatggacgacgtc

SEQ ID NO: 40434 - DNA, 30 bp, Artificial Sequence
  Description of Artificial Sequence: Synthetic gluten; inner sequence
gtacgacgcggaccttcaagtaggcgtgga

SEQ ID NO: 40435 - DNA, 31 bp, Artificial Sequence
  Description of Artificial Sequence: Synthetic gluten; inner sequence
gtacgacgcggacctgtcatggatgggcaca

SEQ ID NO: 40436 - DNA, 30 bp, Artificial Sequence
  Description of Artificial Sequence: Synthetic gluten; inner sequence
gtcatgctcggatgtgggctttacggtcca

SEQ ID NO: 40437 - DNA, 30 bp, Artificial Sequence
  Description of Artificial Sequence: Synthetic gluten; inner sequence
atcatcaggtggacgaatcggaacgtggga

SEQ ID NO: 40438 - DNA, 29 bp, Artificial Sequence
  Description of Artificial Sequence: Synthetic gluten; inner sequence
gtacgcagctgacctcaagtgctcgtggc

SEQ ID NO: 40439 - DNA, 30 bp, Artificial Sequence
  Description of Artificial Sequence: Synthetic gluten; inner sequence
ggcccgagctggatgtggcttgaacgtgtc

SEQ ID NO: 40440 - DNA, 30 bp, Artificial Sequence
  Description of Artificial Sequence: Synthetic gluten; inner sequence
tcatgtccgtcacgcagcatcaagtgcgaa

SEQ ID NO: 40441 - DNA, 30 bp, Artificial Sequence
  Description of Artificial Sequence: Synthetic gluten; inner sequence
cctgcgaagccctgtagaccatgcacgtgc

SEQ ID NO: 40442 - DNA, 30 bp, Artificial Sequence
  Description of Artificial Sequence: Synthetic gluten; inner sequence
caacatagctgccgaacggaatgactcacg

SEQ ID NO: 40443 - DNA, 30 bp, Artificial Sequence; identical to SEQ ID NO: 4801
  Description of Artificial Sequence: Synthetic gluten; inner sequence

SEQ ID NO: 40444 - DNA, 30 bp, Artificial Sequence
  Description of Artificial Sequence: Synthetic gluten; inner sequence
ggcctgagctgaccgaatgtgcgcgctgtc

SEQ ID NO: 40445 - DNA, 30 bp, Artificial Sequence
  Description of Artificial Sequence: Synthetic gluten; inner sequence
tggccgagcgaaccgaagtactgtcagaca

SEQ ID NO: 40446 - DNA, 30 bp, Artificial Sequence; identical to SEQ ID NO: 28922
  Description of Artificial Sequence: Synthetic gluten; inner sequence

SEQ ID NO: 40447 - DNA, 30 bp, Artificial Sequence
  Description of Artificial Sequence: Synthetic gluten; inner sequence
catgtacagatcgaagcgaatctcggcata

SEQ ID NO: 40448 - DNA, 30 bp, Artificial Sequence
  Description of Artificial Sequence: Synthetic gluten; inner sequence
acagatgcacgacgacttccctaattggca

SEQ ID NO: 40449 - DNA, 30 bp, Artificial Sequence
  Description of Artificial Sequence: Synthetic gluten; inner sequence
gcaccacgtgctagcaatggaccgactgga

SEQ ID NO: 40450 - DNA, 30 bp, Artificial Sequence
  Description of Artificial Sequence: Synthetic gluten; inner sequence
aatgtgcccggatcggaacgtggccatgta

SEQ ID NO: 40451 - DNA, 30 bp, Artificial Sequence
  Description of Artificial Sequence: Synthetic gluten; inner sequence
caactcacgtgcctcggcttgctcatttag

SEQ ID NO: 40452 - DNA, 29 bp, Artificial Sequence
  Description of Artificial Sequence: Synthetic gluten; inner sequence
ggccgagcttcccttaagatcaggcacac

SEQ ID NO: 40453 - DNA, 30 bp, Artificial Sequence
  Description of Artificial Sequence: Synthetic gluten; inner sequence
cctgcgatgactaacggaataggcaacatg

SEQ ID NO: 40454 - DNA, 30 bp, Artificial Sequence
  Description of Artificial Sequence: Synthetic gluten; inner sequence
agaaccagcctgaaggagcgagtgtacgag

SEQ ID NO: 40455 - DNA, 30 bp, Artificial Sequence
  Description of Artificial Sequence: Synthetic gluten; inner sequence
catgatcgcaccgaatagatcaggtacgta

SEQ ID NO: 40456 - DNA, 30 bp, Artificial Sequence
  Description of Artificial Sequence: Synthetic gluten; inner sequence
cgcaacgcagaaacgtataagggtggatcg

SEQ ID NO: 40457 - DNA, 30 bp, Artificial Sequence
  Description of Artificial Sequence: Synthetic gluten; inner sequence
catggcggatacagctggaagacaggcata

SEQ ID NO: 40458 - DNA, 30 bp, Artificial Sequence
  Description of Artificial Sequence: Synthetic gluten; inner sequence
cggaacgagcatatcaaacacgtggtggtt

SEQ ID NO: 40459 - DNA, 30 bp, Artificial Sequence
  Description of Artificial Sequence: Synthetic gluten; inner sequence
cctgctcggacctatcatggacggcattca

SEQ ID NO: 40460 - DNA, 30 bp, Artificial Sequence
  Description of Artificial Sequence: Synthetic gluten; inner sequence
catggacgtaactaagcaaacttggccata

SEQ ID NO: 40461 - DNA, 30 bp, Artificial Sequence
  Description of Artificial Sequence: Synthetic gluten; inner sequence
gtcaagagcgacccttcatgaggacatgga

SEQ ID NO: 40462 - DNA, 30 bp, Artificial Sequence
  Description of Artificial Sequence: Synthetic gluten; inner sequence
catgtacgaaacaaggactgggtctcatta

SEQ ID NO: 40463 - DNA, 30 bp, Artificial Sequence
  Description of Artificial Sequence: Synthetic gluten; inner sequence
gtccatagcttgccttcaagggagcgtgga

SEQ ID NO: 40464 - DNA, 30 bp, Artificial Sequence
  Description of Artificial Sequence: Synthetic gluten; inner sequence
aggatgcacgaacttccctacatgtggaca

SEQ ID NO: 40465 - DNA, 30 bp, Artificial Sequence; identical to SEQ ID NO: 201
  Description of Artificial Sequence: Synthetic gluten; inner sequence

SEQ ID NO: 40466 - DNA, 30 bp, Artificial Sequence
  Description of Artificial Sequence: Synthetic gluten; inner sequence
catgtcgttagaaagcatcccaatgtcata

SEQ ID NO: 40467 - DNA, 30 bp, Artificial Sequence
  Description of Artificial Sequence: Synthetic gluten; inner sequence
catgtgcgattcgacgtgcatccgttcata

SEQ ID NO: 40468 - DNA, 30 bp, Artificial Sequence; identical to SEQ ID NO: 161
  Description of Artificial Sequence: Synthetic gluten; inner sequence

SEQ ID NO: 40469 - DNA, 30 bp, Artificial Sequence
  Description of Artificial Sequence: Synthetic gluten; inner sequence
ggccgaatcgaacctaggacatgtcgcgta

SEQ ID NO: 40470 - DNA, 30 bp, Artificial Sequence; identical to SEQ ID NO: 472
  Description of Artificial Sequence: Synthetic gluten; inner sequence

SEQ ID NO: 40471 - DNA, 30 bp, Artificial Sequence; identical to SEQ ID NO: 28472
  Description of Artificial Sequence: Synthetic gluten; inner sequence

SEQ ID NO: 40472 - DNA, 30 bp, Artificial Sequence
  Description of Artificial Sequence: Synthetic gluten; inner sequence
cttcccacaagctggtaggggacgaggcca

SEQ ID NO: 40473 - DNA, 29 bp, Artificial Sequence
  Description of Artificial Sequence: Synthetic gluten; inner sequence
ggcctgcgatggatgtggcatgctctggc

SEQ ID NO: 40474 - DNA, 30 bp, Artificial Sequence; identical to SEQ ID NO: 106
  Description of Artificial Sequence: Synthetic gluten; inner sequence

SEQ ID NO: 40475 - DNA, 30 bp, Artificial Sequence; identical to SEQ ID NO: 245
  Description of Artificial Sequence: Synthetic gluten; inner sequence

SEQ ID NO: 40476 - DNA, 30 bp, Artificial Sequence
  Description of Artificial Sequence: Synthetic gluten; inner sequence
gcatatgcactgcgcgaccctcaagtgaca

SEQ ID NO: 40477 - DNA, 30 bp, Artificial Sequence
  Description of Artificial Sequence: Synthetic gluten; inner sequence
ggcatgagctgcctacaagatggggatgta

SEQ ID NO: 40478 - DNA, 30 bp, Artificial Sequence; identical to SEQ ID NO: 46
  Description of Artificial Sequence: Synthetic gluten; inner sequence

SEQ ID NO: 40479 - DNA, 30 bp, Artificial Sequence
  Description of Artificial Sequence: Synthetic gluten; inner sequence
acgtatcgaacctagcgagtgtgtcgtgga

SEQ ID NO: 40480 - DNA, 31 bp, Artificial Sequence
  Description of Artificial Sequence: Synthetic gluten; inner sequence
tgtactgagcggatgtggactgcacgtaggc

SEQ ID NO: 40481 - DNA, 30 bp, Artificial Sequence; identical to SEQ ID NO: 321
  Description of Artificial Sequence: Synthetic gluten; inner sequence

SEQ ID NO: 40482 - DNA, 30 bp, Artificial Sequence; identical to SEQ ID NO: 186
  Description of Artificial Sequence: Synthetic gluten; inner sequence

SEQ ID NO: 40483 - DNA, 30 bp, Artificial Sequence; identical to SEQ ID NO: 36643
  Description of Artificial Sequence: Synthetic gluten; inner sequence

SEQ ID NO: 40484 - DNA, 30 bp, Artificial Sequence; identical to SEQ ID NO: 401
  Description of Artificial Sequence: Synthetic gluten; inner sequence

SEQ ID NO: 40485 - DNA, 30 bp, Artificial Sequence
  Description of Artificial Sequence: Synthetic gluten; inner sequence
gctccgaacgacccttgtagtgtcaatcca

SEQ ID NO: 40486 - DNA, 30 bp, Artificial Sequence; identical to SEQ ID NO: 611
  Description of Artificial Sequence: Synthetic gluten; inner sequence

SEQ ID NO: 40487 - DNA, 30 bp, Artificial Sequence
  Description of Artificial Sequence: Synthetic gluten; inner sequence
tggccgatcgaccctatcaagagcagcatg

SEQ ID NO: 40488 - DNA, 30 bp, Artificial Sequence
  Description of Artificial Sequence: Synthetic gluten; inner sequence
gtcatatggccgaagcgagaacagctatgt

SEQ ID NO: 40489 - DNA, 30 bp, Artificial Sequence
  Description of Artificial Sequence: Synthetic gluten; inner sequence
tcatcataggaacgagctgacctcggcatg

SEQ ID NO: 40490 - DNA, 30 bp, Artificial Sequence; identical to SEQ ID NO: 359
  Description of Artificial Sequence: Synthetic gluten; inner sequence

SEQ ID NO: 40491 - DNA, 30 bp, Artificial Sequence; identical to SEQ ID NO: 698
  Description of Artificial Sequence: Synthetic gluten; inner sequence

SEQ ID NO: 40492 - DNA, 28 bp, Artificial Sequence
  Description of Artificial Sequence: Synthetic gluten; inner sequence
ccgagagagccgaagaaccaggcaatga

SEQ ID NO: 40493 - DNA, 30 bp, Artificial Sequence; identical to SEQ ID NO: 301
  Description of Artificial Sequence: Synthetic gluten; inner sequence

SEQ ID NO: 40494 - DNA, 30 bp, Artificial Sequence
  Description of Artificial Sequence: Synthetic gluten; inner sequence
catgtaacgataggcaacaatgttgtcata

SEQ ID NO: 40495 - DNA, 30 bp, Artificial Sequence
  Description of Artificial Sequence: Synthetic gluten; inner sequence
acgatcgaacctatcatgacgcgggctata

SEQ ID NO: 40496 - DNA, 30 bp, Artificial Sequence
  Description of Artificial Sequence: Synthetic gluten; inner sequence
ggcatgcgctgggtagtgatcacgtacgga

SEQ ID NO: 40497 - DNA, 30 bp, Artificial Sequence
  Description of Artificial Sequence: Synthetic gluten; inner sequence
tggcatgcgagtcactagtctgtactggcc

SEQ ID NO: 40498 - DNA, 30 bp, Artificial Sequence
  Description of Artificial Sequence: Synthetic gluten; inner sequence
ccgaacgaacctgtcgatcgaagcttcgca

SEQ ID NO: 40499 - DNA, 30 bp, Artificial Sequence; identical to SEQ ID NO: 28497
  Description of Artificial Sequence: Synthetic gluten; inner sequence

SEQ ID NO: 40500 - DNA, 30 bp, Artificial Sequence
  Description of Artificial Sequence: Synthetic gluten; inner sequence
ggccacacgattccctcaagtcgttatgta

SEQ ID NO: 40501 - DNA, 30 bp, Artificial Sequence
  Description of Artificial Sequence: Synthetic gluten; inner sequence
ctccgcgaagtacctcaacaaacgttcggc

SEQ ID NO: 40502 - DNA, 30 bp, Artificial Sequence
  Description of Artificial Sequence: Synthetic gluten; inner sequence
cgtaccagagccgacgattctgtcaatgta

SEQ ID NO: 40503 - DNA, 30 bp, Artificial Sequence; identical to SEQ ID NO: 109
  Description of Artificial Sequence: Synthetic gluten; inner sequence

SEQ ID NO: 40504 - DNA, 30 bp, Artificial Sequence; identical to SEQ ID NO: 36861
  Description of Artificial Sequence: Synthetic gluten; inner sequence

SEQ ID NO: 40505 - DNA, 30 bp, Artificial Sequence
  Description of Artificial Sequence: Synthetic gluten; inner sequence
ggacgacgcgacctacgagtgagacatgga

SEQ ID NO: 40506 - DNA, 30 bp, Artificial Sequence
  Description of Artificial Sequence: Synthetic gluten; inner sequence
ggacgacgcggaccttcaagtaggcgtgta

SEQ ID NO: 40507 - DNA, 30 bp, Artificial Sequence
  Description of Artificial Sequence: Synthetic gluten; inner sequence
cacggtgcgaagctatgtctcatcaacgca

SEQ ID NO: 40508 - DNA, 30 bp, Artificial Sequence
  Description of Artificial Sequence: Synthetic gluten; inner sequence
gtcaatcacatgttctttagagccctcgtg

SEQ ID NO: 40509 - DNA, 30 bp, Artificial Sequence
  Description of Artificial Sequence: Synthetic gluten; inner sequence
gtactgcctggatgttgacatgcacttgtc

SEQ ID NO: 40510 - DNA, 30 bp, Artificial Sequence; identical to SEQ ID NO: 4884
  Description of Artificial Sequence: Synthetic gluten; inner sequence

SEQ ID NO: 40511 - DNA, 30 bp, Artificial Sequence
  Description of Artificial Sequence: Synthetic gluten; inner sequence
gtcactctcaagctatcaagtgcgaaggta

SEQ ID NO: 40512 - DNA, 30 bp, Artificial Sequence
  Description of Artificial Sequence: Synthetic gluten; inner sequence
catgtccggaacgaccacttgagcgtgtca

SEQ ID NO: 40513 - DNA, 30 bp, Artificial Sequence
  Description of Artificial Sequence: Synthetic gluten; inner sequence
tggcatgcgatcccctgacagtacttgagc

SEQ ID NO: 40514 - DNA, 30 bp, Artificial Sequence
  Description of Artificial Sequence: Synthetic gluten; inner sequence
ggcatgcgacttcccttagatccgtacagc

SEQ ID NO: 40515 - DNA, 30 bp, Artificial Sequence
  Description of Artificial Sequence: Synthetic gluten; inner sequence
cctgagcgcaccctcgtcatgcagctagac

SEQ ID NO: 40516 - DNA, 30 bp, Artificial Sequence
  Description of Artificial Sequence: Synthetic gluten; inner sequence
gcccaaacgaccttcaagatggatcgtgta

SEQ ID NO: 40517 - DNA, 30 bp, Artificial Sequence; identical to SEQ ID NO: 312
  Description of Artificial Sequence: Synthetic gluten; inner sequence

SEQ ID NO: 40518 - DNA, 30 bp, Artificial Sequence
  Description of Artificial Sequence: Synthetic gluten; inner sequence
gtgccgaagttgcctacaagtgcgagtgta

SEQ ID NO: 40519 - DNA, 30 bp, Artificial Sequence
  Description of Artificial Sequence: Synthetic gluten; inner sequence
cgtaccgcaagagacgtgtccgtgccgtga

SEQ ID NO: 40520 - DNA, 30 bp, Artificial Sequence
  Description of Artificial Sequence: Synthetic gluten; inner sequence
atggcctgcgtatgaccgtcagagcatgga

SEQ ID NO: 40521 - DNA, 30 bp, Artificial Sequence
  Description of Artificial Sequence: Synthetic gluten; inner sequence
aatgcatcagtgtcaaatgcgttcaagatg

SEQ ID NO: 40522 - DNA, 31 bp, Artificial Sequence
  Description of Artificial Sequence: Synthetic gluten; inner sequence
ggcctgcgatggatgttgacatgcacttgtc

SEQ ID NO: 40523 - DNA, 30 bp, Artificial Sequence
  Description of Artificial Sequence: Synthetic gluten; inner sequence
cattcgcgacctaaacgtgacatggacgga

SEQ ID NO: 40524 - DNA, 30 bp, Artificial Sequence
  Description of Artificial Sequence: Synthetic gluten; inner sequence
tgtacgtcgcgacctacatgtgctgcatca

SEQ ID NO: 40525 - DNA, 30 bp, Artificial Sequence
  Description of Artificial Sequence: Synthetic gluten; inner sequence
gtgcgcgaaaacctatcacgtgatcatgga

SEQ ID NO: 40526 - DNA, 30 bp, Artificial Sequence
  Description of Artificial Sequence: Synthetic gluten; inner sequence
atcacgcatagggacttcgatggcacgtca

SEQ ID NO: 40527 - DNA, 30 bp, Artificial Sequence
  Description of Artificial Sequence: Synthetic gluten; inner sequence
tgacgaacgcaacctatagaacatgtcgta

SEQ ID NO: 40528 - DNA, 30 bp, Artificial Sequence
  Description of Artificial Sequence: Synthetic gluten; inner sequence
ggacggatcgaacctacaagctgtcgtgga

SEQ ID NO: 40529 - DNA, 30 bp, Artificial Sequence; identical to SEQ ID NO: 198
  Description of Artificial Sequence: Synthetic gluten; inner sequence

SEQ ID NO: 40530 - DNA, 30 bp, Artificial Sequence; identical to SEQ ID NO: 168
  Description of Artificial Sequence: Synthetic gluten; inner sequence

SEQ ID NO: 40531 - DNA, 30 bp, Artificial Sequence
  Description of Artificial Sequence: Synthetic gluten; inner sequence
caaacgcagtgagcatatggcataagtggg

SEQ ID NO: 40532 - DNA, 30 bp, Artificial Sequence
  Description of Artificial Sequence: Synthetic gluten; inner sequence
gtactgcgcgaccctaaagtgataggcatg

SEQ ID NO: 40533 - DNA, 29 bp, Artificial Sequence
  Description of Artificial Sequence: Synthetic gluten; inner sequence
acgaatgagccgaagatacaatgtcagta

SEQ ID NO: 40534 - DNA, 29 bp, Artificial Sequence
  Description of Artificial Sequence: Synthetic gluten; inner sequence
tgagctagcgagaaccgaagatacaggga

SEQ ID NO: 40535 - DNA, 30 bp, Artificial Sequence
  Description of Artificial Sequence: Synthetic gluten; inner sequence
gactgaacgaccgaaaggggacatgacgag

SEQ ID NO: 40536 - DNA, 30 bp, Artificial Sequence
  Description of Artificial Sequence: Synthetic gluten; inner sequence
tcatgtgtcacgaagccctacaagtcgtca

SEQ ID NO: 40537 - DNA, 30 bp, Artificial Sequence
  Description of Artificial Sequence: Synthetic gluten; inner sequence
cctgagcgaacctgtcaacatcacggagca

SEQ ID NO: 40538 - DNA, 30 bp, Artificial Sequence; identical to SEQ ID NO: 126
  Description of Artificial Sequence: Synthetic gluten; inner sequence

SEQ ID NO: 40539 - DNA, 30 bp, Artificial Sequence
  Description of Artificial Sequence: Synthetic gluten; inner sequence
cacgtcacagggccgacctctcatgaacta

SEQ ID NO: 40540 - DNA, 30 bp, Artificial Sequence
  Description of Artificial Sequence: Synthetic gluten; inner sequence
caatagagccgaagagcaatgtcaacgagt

SEQ ID NO: 40541 - DNA, 30 bp, Artificial Sequence
  Description of Artificial Sequence: Synthetic gluten; inner sequence
cgcaacggaagtaaaatcagttccgaaacg

SEQ ID NO: 40542 - DNA, 30 bp, Artificial Sequence
  Description of Artificial Sequence: Synthetic gluten; inner sequence
cggcagtcgtaaacgaatcggctaggcata

SEQ ID NO: 40543 - DNA, 30 bp, Artificial Sequence
  Description of Artificial Sequence: Synthetic gluten; inner sequence
tcactcgtgtccaacctcccttcgtggaca

SEQ ID NO: 40544 - DNA, 29 bp, Artificial Sequence
  Description of Artificial Sequence: Synthetic gluten; inner sequence
atgatcctgcacgaccaaagttggccatg

SEQ ID NO: 40545 - DNA, 30 bp, Artificial Sequence
  Description of Artificial Sequence: Synthetic gluten; inner sequence
tgatcgcatggacgtcgatggatgtgggca

SEQ ID NO: 40546 - DNA, 30 bp, Artificial Sequence
  Description of Artificial Sequence: Synthetic gluten; inner sequence
ccgaacgaccgggaatgaacgtgtcagaaa

SEQ ID NO: 40547 - DNA, 30 bp, Artificial Sequence
  Description of Artificial Sequence: Synthetic gluten; inner sequence
catgtacggacgaggcattgcgtgctcata

SEQ ID NO: 40548 - DNA, 30 bp, Artificial Sequence
  Description of Artificial Sequence: Synthetic gluten; inner sequence
tgaccgatcgaccctatcaagtgcagcatg

SEQ ID NO: 40549 - DNA, 30 bp, Artificial Sequence
  Description of Artificial Sequence: Synthetic gluten; inner sequence
ccgatcgacctgaatgtgcgtggcaattga

SEQ ID NO: 40550 - DNA, 30 bp, Artificial Sequence
  Description of Artificial Sequence: Synthetic gluten; inner sequence
gacgatgctgaccgtcaagggagtcacgta

SEQ ID NO: 40551 - DNA, 30 bp, Artificial Sequence
  Description of Artificial Sequence: Synthetic gluten; inner sequence
tgaacaagcataggacgacacgcagtcata

SEQ ID NO: 40552 - DNA, 30 bp, Artificial Sequence
  Description of Artificial Sequence: Synthetic gluten; inner sequence
ggactgcacgaccgatagagcatggactgt

SEQ ID NO: 40553 - DNA, 30 bp, Artificial Sequence
  Description of Artificial Sequence: Synthetic gluten; inner sequence
catccaccgatagcgaatatggcctggatc

SEQ ID NO: 40554 - DNA, 30 bp, Artificial Sequence; identical to SEQ ID NO: 12939
  Description of Artificial Sequence: Synthetic gluten; inner sequence

SEQ ID NO: 40555 - DNA, 30 bp, Artificial Sequence
  Description of Artificial Sequence: Synthetic gluten; inner sequence
atgtacggatcgaacgtggtagtgtgcgca

SEQ ID NO: 40556 - DNA, 30 bp, Artificial Sequence
  Description of Artificial Sequence: Synthetic gluten; inner sequence
cgacacgctacctgtgatctggacttggca

SEQ ID NO: 40557 - DNA, 30 bp, Artificial Sequence
  Description of Artificial Sequence: Synthetic gluten; inner sequence
tgcaacggcaccgtagattccacaacagtg

SEQ ID NO: 40558 - DNA, 30 bp, Artificial Sequence
  Description of Artificial Sequence: Synthetic gluten; inner sequence
ctcagcgcaaagaccttcaatgcgatcggc

SEQ ID NO: 40559 - DNA, 31 bp, Artificial Sequence
  Description of Artificial Sequence: Synthetic gluten; inner sequence
tggcctgatcgaacctagagagtggcgtgga

SEQ ID NO: 40560 - DNA, 30 bp, Artificial Sequence
  Description of Artificial Sequence: Synthetic gluten; inner sequence
cgacacgatggccttactgtgagcgggtca

SEQ ID NO: 40561 - DNA, 30 bp, Artificial Sequence
  Description of Artificial Sequence: Synthetic gluten; inner sequence
ggcctgatcgaacctagagcgtggcgtgga

SEQ ID NO: 40562 - DNA, 30 bp, Artificial Sequence
  Description of Artificial Sequence: Synthetic gluten; inner sequence
cgaaacgccgtaaaagagctcatgtgggtt

SEQ ID NO: 40563 - DNA, 30 bp, Artificial Sequence
  Description of Artificial Sequence: Synthetic gluten; inner sequence
gaacgcatgtcgtccctacacgtgatcatg

SEQ ID NO: 40564 - DNA, 30 bp, Artificial Sequence
  Description of Artificial Sequence: Synthetic gluten; inner sequence
ggacaacgatgaacggaagggcgtcgggta

SEQ ID NO: 40565 - DNA, 30 bp, Artificial Sequence; identical to SEQ ID NO: 479
  Description of Artificial Sequence: Synthetic gluten; inner sequence

SEQ ID NO: 40566 - DNA, 30 bp, Artificial Sequence
  Description of Artificial Sequence: Synthetic gluten; inner sequence
tcggcacgaaactttagagccctaacggtg

SEQ ID NO: 40567 - DNA, 30 bp, Artificial Sequence
  Description of Artificial Sequence: Synthetic gluten; inner sequence
ggccgatcgaccgaaagaacgaacgacgtg

SEQ ID NO: 40568 - DNA, 30 bp, Artificial Sequence
  Description of Artificial Sequence: Synthetic gluten; inner sequence
tggccgatcgaccctatcaagcgcagcatg

SEQ ID NO: 40569 - DNA, 29 bp, Artificial Sequence
  Description of Artificial Sequence: Synthetic gluten; inner sequence
gacgacgcgaacctatcaagttgcatgga

SEQ ID NO: 40570 - DNA, 30 bp, Artificial Sequence; identical to SEQ ID NO: 827
  Description of Artificial Sequence: Synthetic gluten; inner sequence

SEQ ID NO: 40571 - DNA, 30 bp, Artificial Sequence; identical to SEQ ID NO: 136
  Description of Artificial Sequence: Synthetic gluten; inner sequence

SEQ ID NO: 40572 - DNA, 30 bp, Artificial Sequence
  Description of Artificial Sequence: Synthetic gluten; inner sequence
ggacagaacggacctatcatgtgacaggta

SEQ ID NO: 40573 - DNA, 30 bp, Artificial Sequence
  Description of Artificial Sequence: Synthetic gluten; inner sequence
atggccggatcggaccgtgagtgctagtca

SEQ ID NO: 40574 - DNA, 30 bp, Artificial Sequence
  Description of Artificial Sequence: Synthetic gluten; inner sequence
cctaaacgcacccttcaagttggcatcgta

SEQ ID NO: 40575 - DNA, 30 bp, Artificial Sequence
  Description of Artificial Sequence: Synthetic gluten; inner sequence
ggcctgatcgaacctagagagtggcgttga

SEQ ID NO: 40576 - DNA, 30 bp, Artificial Sequence
  Description of Artificial Sequence: Synthetic gluten; inner sequence
actcgtatggccgattgacctcaatgggca

SEQ ID NO: 40577 - DNA, 30 bp, Artificial Sequence
  Description of Artificial Sequence: Synthetic gluten; inner sequence
gcactgcgatgacctaagatctaggcagca

SEQ ID NO: 40578 - DNA, 30 bp, Artificial Sequence; identical to SEQ ID NO: 12744
  Description of Artificial Sequence: Synthetic gluten; inner sequence

SEQ ID NO: 40579 - DNA, 30 bp, Artificial Sequence
  Description of Artificial Sequence: Synthetic gluten; inner sequence
gccttccgaacccttcatgtgatcgtggac

SEQ ID NO: 40580 - DNA, 30 bp, Artificial Sequence
  Description of Artificial Sequence: Synthetic gluten; inner sequence
caattggcctgaacgaaccttggtgcggct

SEQ ID NO: 40581 - DNA, 30 bp, Artificial Sequence
  Description of Artificial Sequence: Synthetic gluten; inner sequence
gaccgcacgatgaccatttcaacgtggcca

SEQ ID NO: 40582 - DNA, 30 bp, Artificial Sequence
  Description of Artificial Sequence: Synthetic gluten; inner sequence
ggcctaacgtaccttcaagtcaggagtgta

SEQ ID NO: 40583 - DNA, 25 bp, Artificial Sequence
  Description of Artificial Sequence: Synthetic gluten; inner sequence
cgtaccggcatgctctaggcaacca

SEQ ID NO: 40584 - DNA, 30 bp, Artificial Sequence
  Description of Artificial Sequence: Synthetic gluten; inner sequence
acggtcacgaccacttgccaaatgttagct

SEQ ID NO: 40585 - DNA, 30 bp, Artificial Sequence
  Description of Artificial Sequence: Synthetic gluten; inner sequence
tgcccaaacgaaccttagagcatggccgta

SEQ ID NO: 40586 - DNA, 30 bp, Artificial Sequence; identical to SEQ ID NO: 36677
  Description of Artificial Sequence: Synthetic gluten; inner sequence

SEQ ID NO: 40587 - DNA, 30 bp, Artificial Sequence
  Description of Artificial Sequence: Synthetic gluten; inner sequence
tcagtccgacctgaactatctgggcacgca

SEQ ID NO: 40588 - DNA, 30 bp, Artificial Sequence
  Description of Artificial Sequence: Synthetic gluten; inner sequence
catgtacgaacgcgacattcatgttcatta

SEQ ID NO: 40589 - DNA, 30 bp, Artificial Sequence
  Description of Artificial Sequence: Synthetic gluten; inner sequence
tggcccgagcgaaccgatcacagtgaggca

SEQ ID NO: 40590 - DNA, 30 bp, Artificial Sequence
  Description of Artificial Sequence: Synthetic gluten; inner sequence
taacatgtcacagtgggccttgctcgaacc

SEQ ID NO: 40591 - DNA, 30 bp, Artificial Sequence
  Description of Artificial Sequence: Synthetic gluten; inner sequence
ggccagagcgtaccttcatgtataggcaaa

SEQ ID NO: 40592 - DNA, 28 bp, Artificial Sequence
  Description of Artificial Sequence: Synthetic gluten; inner sequence
ggccgacacccctatcaagctggacatg

SEQ ID NO: 40593 - DNA, 30 bp, Artificial Sequence
  Description of Artificial Sequence: Synthetic gluten; inner sequence
ggccgaatcggaactagcaagcggtatgta

SEQ ID NO: 40594 - DNA, 30 bp, Artificial Sequence
  Description of Artificial Sequence: Synthetic gluten; inner sequence
ggcctgcgatgaccgctcaagtgccaggca

SEQ ID NO: 40595 - DNA, 30 bp, Artificial Sequence; identical to SEQ ID NO: 36642
  Description of Artificial Sequence: Synthetic gluten; inner sequence

SEQ ID NO: 40596 - DNA, 30 bp, Artificial Sequence
  Description of Artificial Sequence: Synthetic gluten; inner sequence
ggcctgcgatggatgaggcgctgcactagt

SEQ ID NO: 40597 - DNA, 30 bp, Artificial Sequence
  Description of Artificial Sequence: Synthetic gluten; inner sequence
actgatcgaaccgtcgaagtcagtttcaca

SEQ ID NO: 40598 - DNA, 30 bp, Artificial Sequence
  Description of Artificial Sequence: Synthetic gluten; inner sequence
ggacggagcgaaccaagtacaggcagctta

SEQ ID NO: 40599 - DNA, 30 bp, Artificial Sequence
  Description of Artificial Sequence: Synthetic gluten; inner sequence
catgtctaacagaaggccactcggctcata

SEQ ID NO: 40600 - DNA, 30 bp, Artificial Sequence; identical to SEQ ID NO: 28928
  Description of Artificial Sequence: Synthetic gluten; inner sequence

SEQ ID NO: 40601 - DNA, 30 bp, Artificial Sequence
  Description of Artificial Sequence: Synthetic gluten; inner sequence
ccgagacaagctacatcagacaattgctaa

SEQ ID NO: 40602 - DNA, 30 bp, Artificial Sequence
  Description of Artificial Sequence: Synthetic gluten; inner sequence
gtactgatcggaacatggcgactgtcaacg

SEQ ID NO: 40603 - DNA, 30 bp, Artificial Sequence
  Description of Artificial Sequence: Synthetic gluten; inner sequence
ggccgacgcgcactgttcatgcactacgtc

SEQ ID NO: 40604 - DNA, 30 bp, Artificial Sequence
  Description of Artificial Sequence: Synthetic gluten; inner sequence
catgcactggaacgagtgggaaccagcata

SEQ ID NO: 40605 - DNA, 30 bp, Artificial Sequence
  Description of Artificial Sequence: Synthetic gluten; inner sequence
cgtaccgcaagtgacgtgtccgcgccgtga

SEQ ID NO: 40606 - DNA, 30 bp, Artificial Sequence
  Description of Artificial Sequence: Synthetic gluten; inner sequence
tggaggacgcagtaaataacgagctcgtgg

SEQ ID NO: 40607 - DNA, 30 bp, Artificial Sequence
  Description of Artificial Sequence: Synthetic gluten; inner sequence
ggccgaagcgaacactagtcagagcatgta

SEQ ID NO: 40608 - DNA, 30 bp, Artificial Sequence
  Description of Artificial Sequence: Synthetic gluten; inner sequence
ggacctgagctgcacgatcaaggcggaatg

SEQ ID NO: 40609 - DNA, 30 bp, Artificial Sequence
  Description of Artificial Sequence: Synthetic gluten; inner sequence
gatgtcctgcgatgacctaaagcgtacgtg

SEQ ID NO: 40610 - DNA, 30 bp, Artificial Sequence; identical to SEQ ID NO: 4407
  Description of Artificial Sequence: Synthetic gluten; inner sequence

SEQ ID NO: 40611 - DNA, 30 bp, Artificial Sequence
  Description of Artificial Sequence: Synthetic gluten; inner sequence
catgtgctaattcggacggacaagttcata

SEQ ID NO: 40612 - DNA, 30 bp, Artificial Sequence
  Description of Artificial Sequence: Synthetic gluten; inner sequence
tgacatgtgaccgactggcttagctgggca

SEQ ID NO: 40613 - DNA, 30 bp, Artificial Sequence
  Description of Artificial Sequence: Synthetic gluten; inner sequence
ggccgacgagaccctgcaattggccatgga

SEQ ID NO: 40614 - DNA, 30 bp, Artificial Sequence
  Description of Artificial Sequence: Synthetic gluten; inner sequence
gtactgcgcgacctcaacgtgcgtgatgta

SEQ ID NO: 40615 - DNA, 30 bp, Artificial Sequence
  Description of Artificial Sequence: Synthetic gluten; inner sequence
ccgaacggcgtgtaatgggcaaacttcaga

SEQ ID NO: 40616 - DNA, 30 bp, Artificial Sequence
  Description of Artificial Sequence: Synthetic gluten; inner sequence
ggacgcaacgaacctaagagtggccaggga

SEQ ID NO: 40617 - DNA, 30 bp, Artificial Sequence
  Description of Artificial Sequence: Synthetic gluten; inner sequence
ggcctgcgatggatggggcaatacgacgtt

SEQ ID NO: 40618 - DNA, 30 bp, Artificial Sequence
  Description of Artificial Sequence: Synthetic gluten; inner sequence
gacattcgagtcaccagtcatgcacgacga

SEQ ID NO: 40619 - DNA, 30 bp, Artificial Sequence
  Description of Artificial Sequence: Synthetic gluten; inner sequence
ggcccgaacgaccgttgaagagcatgcact

SEQ ID NO: 40620 - DNA, 30 bp, Artificial Sequence
  Description of Artificial Sequence: Synthetic gluten; inner sequence
tcatcagatggacgccgaatgggtgtgggc

SEQ ID NO: 40621 - DNA, 30 bp, Artificial Sequence
  Description of Artificial Sequence: Synthetic gluten; inner sequence
ggacgcgatggatgtggaaaggtctagtca

SEQ ID NO: 40622 - DNA, 30 bp, Artificial Sequence
  Description of Artificial Sequence: Synthetic gluten; inner sequence
atggacgcagcgtaccttcaagtgctcgtg

SEQ ID NO: 40623 - DNA, 30 bp, Artificial Sequence
  Description of Artificial Sequence: Synthetic gluten; inner sequence
tggcatgcgatggttccgagaaagtgcgaa

SEQ ID NO: 40624 - DNA, 30 bp, Artificial Sequence
  Description of Artificial Sequence: Synthetic gluten; inner sequence
ggactgcgacttcacagatcaggcaatgca

SEQ ID NO: 40625 - DNA, 30 bp, Artificial Sequence
  Description of Artificial Sequence: Synthetic gluten; inner sequence
ggcattcgatgcactacaaggtgttgtgta

SEQ ID NO: 40626 - DNA, 30 bp, Artificial Sequence
  Description of Artificial Sequence: Synthetic gluten; inner sequence
catggctaaacagcagcgtaattcgtcata

SEQ ID NO: 40627 - DNA, 30 bp, Artificial Sequence
  Description of Artificial Sequence: Synthetic gluten; inner sequence
tcacagatggcgtgatctgaaccggtggca

SEQ ID NO: 40628 - DNA, 30 bp, Artificial Sequence
  Description of Artificial Sequence: Synthetic gluten; inner sequence
ggccgagctggatgtgagcatgcatctagt

SEQ ID NO: 40629 - DNA, 30 bp, Artificial Sequence
  Description of Artificial Sequence: Synthetic gluten; inner sequence
ccgatcagccctatcaagcatgcactgtct

SEQ ID NO: 40630 - DNA, 30 bp, Artificial Sequence
  Description of Artificial Sequence: Synthetic gluten; inner sequence
tcgaatatgtacgaagatgcccattcagtg

SEQ ID NO: 40631 - DNA, 30 bp, Artificial Sequence
  Description of Artificial Sequence: Synthetic gluten; inner sequence
ctcattagtggccgagaccgcaattccatc

SEQ ID NO: 40632 - DNA, 30 bp, Artificial Sequence; identical to SEQ ID NO: 36961
  Description of Artificial Sequence: Synthetic gluten; inner sequence

SEQ ID NO: 40633 - DNA, 30 bp, Artificial Sequence
  Description of Artificial Sequence: Synthetic gluten; inner sequence
ccagcatctcataagtggccttacctgcct

SEQ ID NO: 40634 - DNA, 30 bp, Artificial Sequence
  Description of Artificial Sequence: Synthetic gluten; inner sequence
gtcctgatcgccctagcaagcggccatgga

SEQ ID NO: 40635 - DNA, 30 bp, Artificial Sequence
  Description of Artificial Sequence: Synthetic gluten; inner sequence
cctgacacgataaagatagagcttgcacga

SEQ ID NO: 40636 - DNA, 30 bp, Artificial Sequence
  Description of Artificial Sequence: Synthetic gluten; inner sequence
cctgctggagcctgagccgaagatcagtca

SEQ ID NO: 40637 - DNA, 30 bp, Artificial Sequence
  Description of Artificial Sequence: Synthetic gluten; inner sequence
tcaagatggccgaacgaaacatggcagtca

SEQ ID NO: 40638 - DNA, 30 bp, Artificial Sequence
  Description of Artificial Sequence: Synthetic gluten; inner sequence
cacaacgcaagtcttcctttatgtcatcta

SEQ ID NO: 40639 - DNA, 30 bp, Artificial Sequence
  Description of Artificial Sequence: Synthetic gluten; inner sequence
ccatcatagggttggtgccactgatgtata

SEQ ID NO: 40640 - DNA, 30 bp, Artificial Sequence
  Description of Artificial Sequence: Synthetic gluten; inner sequence
catgacgatcacagcgaggtttacgtcata

SEQ ID NO: 40641 - DNA, 25 bp, Artificial Sequence
  Description of Artificial Sequence: Synthetic gluten; inner sequence
ccgagctgacctatcaacgcggtca

SEQ ID NO: 40642 - DNA, 30 bp, Artificial Sequence
  Description of Artificial Sequence: Synthetic gluten; inner sequence
agtcacgccctaacgttgcctatgctagca

SEQ ID NO: 40643 - DNA, 30 bp, Artificial Sequence
  Description of Artificial Sequence: Synthetic gluten; inner sequence
ccgatcgaaaccggagagcatgcacggagc

SEQ ID NO: 40644 - DNA, 30 bp, Artificial Sequence
  Description of Artificial Sequence: Synthetic gluten; inner sequence
atgtactgtatccacggtcatagagcatca

SEQ ID NO: 40645 - DNA, 30 bp, Artificial Sequence
  Description of Artificial Sequence: Synthetic gluten; inner sequence
cgtaccgcaagtgacgcgtccgtgccgtga

SEQ ID NO: 40646 - DNA, 27 bp, Artificial Sequence
  Description of Artificial Sequence: Synthetic gluten; inner sequence
cctgagcgcacctgggcatcactgtca

SEQ ID NO: 40647 - DNA, 30 bp, Artificial Sequence
  Description of Artificial Sequence: Synthetic gluten; inner sequence
tatggactgagcggaactgcactatgcatg

SEQ ID NO: 40648 - DNA, 30 bp, Artificial Sequence; identical to SEQ ID NO: 791
  Description of Artificial Sequence: Synthetic gluten; inner sequence

SEQ ID NO: 40649 - DNA, 30 bp, Artificial Sequence
  Description of Artificial Sequence: Synthetic gluten; inner sequence
aatgtggactgagcggaacttaagatagta

SEQ ID NO: 40650 - DNA, 30 bp, Artificial Sequence
  Description of Artificial Sequence: Synthetic gluten; inner sequence
tcttcgcggaacgatttagacgcgtcaact

SEQ ID NO: 40651 - DNA, 30 bp, Artificial Sequence; identical to SEQ ID NO: 926
  Description of Artificial Sequence: Synthetic gluten; inner sequence

SEQ ID NO: 40652 - DNA, 30 bp, Artificial Sequence
  Description of Artificial Sequence: Synthetic gluten; inner sequence
ggactgaacgagcctagtcttagcgtgtct

SEQ ID NO: 40653 - DNA, 30 bp, Artificial Sequence; identical to SEQ ID NO: 63
  Description of Artificial Sequence: Synthetic gluten; inner sequence

SEQ ID NO: 40654 - DNA, 30 bp, Artificial Sequence
  Description of Artificial Sequence: Synthetic gluten; inner sequence
cctgaacgcgtcctaatgagtcattacgaa

SEQ ID NO: 40655 - DNA, 30 bp, Artificial Sequence
  Description of Artificial Sequence: Synthetic gluten; inner sequence
ccgagcggaaatggaataggcaaaccagct

SEQ ID NO: 40656 - DNA, 30 bp, Artificial Sequence
  Description of Artificial Sequence: Synthetic gluten; inner sequence
ccgagcgacattacaaggcaaaactttggt

SEQ ID NO: 40657 - DNA, 30 bp, Artificial Sequence
  Description of Artificial Sequence: Synthetic gluten; inner sequence
cgaaacgcggtgcagtaagatgtgcttcgc

SEQ ID NO: 40658 - DNA, 30 bp, Artificial Sequence
  Description of Artificial Sequence: Synthetic gluten; inner sequence
gtcatgcgcggaccttcaagtaggcgtgta

SEQ ID NO: 40659 - DNA, 30 bp, Artificial Sequence
  Description of Artificial Sequence: Synthetic gluten; inner sequence
aatgtgtcatgatcgcaccctcaagttggc

SEQ ID NO: 40660 - DNA, 30 bp, Artificial Sequence
  Description of Artificial Sequence: Synthetic gluten; inner sequence
cggtccagataccagacgggctaggcacaa

SEQ ID NO: 40661 - DNA, 30 bp, Artificial Sequence
  Description of Artificial Sequence: Synthetic gluten; inner sequence
cttacctagcacgtggacaggtaggcggac

SEQ ID NO: 40662 - DNA, 30 bp, Artificial Sequence
  Description of Artificial Sequence: Synthetic gluten; inner sequence
cctgcgcgaaccgttagaactagtactggc

SEQ ID NO: 40663 - DNA, 30 bp, Artificial Sequence
  Description of Artificial Sequence: Synthetic gluten; inner sequence
ggcctgatcgaacctagagagtggcgagga

SEQ ID NO: 40664 - DNA, 30 bp, Artificial Sequence
  Description of Artificial Sequence: Synthetic gluten; inner sequence
ctcatcacatggccgaccgtagatggacga

SEQ ID NO: 40665 - DNA, 30 bp, Artificial Sequence
  Description of Artificial Sequence: Synthetic gluten; inner sequence
catgtacacaccaaagttagcttgctcata

SEQ ID NO: 40666 - DNA, 30 bp, Artificial Sequence
  Description of Artificial Sequence: Synthetic gluten; inner sequence
tggcatgaacgaacctattcaaacggtcta

SEQ ID NO: 40667 - DNA, 30 bp, Artificial Sequence
  Description of Artificial Sequence: Synthetic gluten; inner sequence
gtgctcgaaacccgtaagtggcatggcgta

SEQ ID NO: 40668 - DNA, 30 bp, Artificial Sequence
  Description of Artificial Sequence: Synthetic gluten; inner sequence
catgcccaacgggatgtacgcctagtccaa

SEQ ID NO: 40669 - DNA, 30 bp, Artificial Sequence; identical to SEQ ID NO: 943
  Description of Artificial Sequence: Synthetic gluten; inner sequence

SEQ ID NO: 40670 - DNA, 30 bp, Artificial Sequence
  Description of Artificial Sequence: Synthetic gluten; inner sequence
cgacagagccgaagaacgagtgttaacgca

SEQ ID NO: 40671 - DNA, 30 bp, Artificial Sequence
  Description of Artificial Sequence: Synthetic gluten; inner sequence
gtcatgcgataccctaacgagctaggcata

SEQ ID NO: 40672 - DNA, 30 bp, Artificial Sequence; identical to SEQ ID NO: 4348
  Description of Artificial Sequence: Synthetic gluten; inner sequence

SEQ ID NO: 40673 - DNA, 30 bp, Artificial Sequence
  Description of Artificial Sequence: Synthetic gluten; inner sequence
ggactgaacgacccctagatatggacgaga

SEQ ID NO: 40674 - DNA, 30 bp, Artificial Sequence
  Description of Artificial Sequence: Synthetic gluten; inner sequence
gccacatcgtccctagcaagcaggcttgta

SEQ ID NO: 40675 - DNA, 30 bp, Artificial Sequence
  Description of Artificial Sequence: Synthetic gluten; inner sequence
tgagatggcctgatcggaaagtacgacgta

SEQ ID NO: 40676 - DNA, 30 bp, Artificial Sequence
  Description of Artificial Sequence: Synthetic gluten; inner sequence
ccgacgatgaaccaaccatgctactttggc

SEQ ID NO: 40677 - DNA, 30 bp, Artificial Sequence
  Description of Artificial Sequence: Synthetic gluten; inner sequence
cacaacgtgcgaaataggactgatcgagcc

SEQ ID NO: 40678 - DNA, 30 bp, Artificial Sequence
  Description of Artificial Sequence: Synthetic gluten; inner sequence
catgacggacagcagctcttagtaggcata

SEQ ID NO: 40679 - DNA, 30 bp, Artificial Sequence
  Description of Artificial Sequence: Synthetic gluten; inner sequence
ggactgaacgaaccggtaagaacatgggaa

SEQ ID NO: 40680 - DNA, 30 bp, Artificial Sequence
  Description of Artificial Sequence: Synthetic gluten; inner sequence
catgtacccaacactagccaccggggcata

SEQ ID NO: 40681 - DNA, 30 bp, Artificial Sequence
  Description of Artificial Sequence: Synthetic gluten; inner sequence
gtgcggaacgagcccttcgagtgccatgga

SEQ ID NO: 40682 - DNA, 30 bp, Artificial Sequence
  Description of Artificial Sequence: Synthetic gluten; inner sequence
tacacattggccgacgattcactaaggaca

SEQ ID NO: 40683 - DNA, 25 bp, Artificial Sequence
  Description of Artificial Sequence: Synthetic gluten; inner sequence
ggcatgcgatggatgtgtgcatgta

SEQ ID NO: 40684 - DNA, 30 bp, Artificial Sequence
  Description of Artificial Sequence: Synthetic gluten; inner sequence
ccgatcgacacctgggactgatctgacata

SEQ ID NO: 40685 - DNA, 30 bp, Artificial Sequence; identical to SEQ ID NO: 406
  Description of Artificial Sequence: Synthetic gluten; inner sequence

SEQ ID NO: 40686 - DNA, 30 bp, Artificial Sequence
  Description of Artificial Sequence: Synthetic gluten; inner sequence
catgtgacggaaaagagcggtatcgtcata

SEQ ID NO: 40687 - DNA, 31 bp, Artificial Sequence
  Description of Artificial Sequence: Synthetic gluten; inner sequence
acacatggcatgagcgatccttcaggtggga

SEQ ID NO: 40688 - DNA, 30 bp, Artificial Sequence
  Description of Artificial Sequence: Synthetic gluten; inner sequence
cgaacgcaagctcgagacaatggcattcga

SEQ ID NO: 40689 - DNA, 30 bp, Artificial Sequence; identical to SEQ ID NO: 478
  Description of Artificial Sequence: Synthetic gluten; inner sequence

SEQ ID NO: 40690 - DNA, 30 bp, Artificial Sequence; identical to SEQ ID NO: 92
  Description of Artificial Sequence: Synthetic gluten; inner sequence

SEQ ID NO: 40691 - DNA, 30 bp, Artificial Sequence
  Description of Artificial Sequence: Synthetic gluten; inner sequence
aatgtgcccgctgattcccttcgagtgtca

SEQ ID NO: 40692 - DNA, 30 bp, Artificial Sequence
  Description of Artificial Sequence: Synthetic gluten; inner sequence
acattggacggaacgacccttcaagcgtgc

SEQ ID NO: 40693 - DNA, 30 bp, Artificial Sequence; identical to SEQ ID NO: 12872
  Description of Artificial Sequence: Synthetic gluten; inner sequence

SEQ ID NO: 40694 - DNA, 30 bp, Artificial Sequence
  Description of Artificial Sequence: Synthetic gluten; inner sequence
gtgcgaacacgagcctatcaaggaggcatg

SEQ ID NO: 40695 - DNA, 30 bp, Artificial Sequence
  Description of Artificial Sequence: Synthetic gluten; inner sequence
gtacgatcgcaccctaggcatgtcgacgct

SEQ ID NO: 40696 - DNA, 30 bp, Artificial Sequence
  Description of Artificial Sequence: Synthetic gluten; inner sequence
acgatcgcaccatcaagtcggccttggaca

SEQ ID NO: 40697 - DNA, 30 bp, Artificial Sequence
  Description of Artificial Sequence: Synthetic gluten; inner sequence
ggccgagcttcccgagtcaaatgctaggcg

SEQ ID NO: 40698 - DNA, 30 bp, Artificial Sequence
  Description of Artificial Sequence: Synthetic gluten; inner sequence
cgtgtacgaatctagcaccgcgttggcata

SEQ ID NO: 40699 - DNA, 30 bp, Artificial Sequence; identical to SEQ ID NO: 4881
  Description of Artificial Sequence: Synthetic gluten; inner sequence

SEQ ID NO: 40700 - DNA, 30 bp, Artificial Sequence
  Description of Artificial Sequence: Synthetic gluten; inner sequence
ggccgacctggatgcgagcatgcatctagt

SEQ ID NO: 40701 - DNA, 30 bp, Artificial Sequence
  Description of Artificial Sequence: Synthetic gluten; inner sequence
ggacggatcgaacctacaaggtgtcgtgga

SEQ ID NO: 40702 - DNA, 30 bp, Artificial Sequence
  Description of Artificial Sequence: Synthetic gluten; inner sequence
ggcattcgatgcactacaagatgttgtgta

SEQ ID NO: 40703 - DNA, 30 bp, Artificial Sequence
  Description of Artificial Sequence: Synthetic gluten; inner sequence
ggcattcgatgcaccttcgtcagtctgtca

SEQ ID NO: 40704 - DNA, 30 bp, Artificial Sequence
  Description of Artificial Sequence: Synthetic gluten; inner sequence
gagaacgcaggacaaatctatgggctgatc

SEQ ID NO: 40705 - DNA, 30 bp, Artificial Sequence
  Description of Artificial Sequence: Synthetic gluten; inner sequence
ccgactcggaactagggaattggcgcagtc

SEQ ID NO: 40706 - DNA, 30 bp, Artificial Sequence; identical to SEQ ID NO: 28406
  Description of Artificial Sequence: Synthetic gluten; inner sequence

SEQ ID NO: 40707 - DNA, 30 bp, Artificial Sequence
  Description of Artificial Sequence: Synthetic gluten; inner sequence
caacaggaactgctggcctttatgtcacta

SEQ ID NO: 40708 - DNA, 30 bp, Artificial Sequence; identical to SEQ ID NO: 32332
  Description of Artificial Sequence: Synthetic gluten; inner sequence

SEQ ID NO: 40709 - DNA, 30 bp, Artificial Sequence; identical to SEQ ID NO: 26
  Description of Artificial Sequence: Synthetic gluten; inner sequence

SEQ ID NO: 40710 - DNA, 31 bp, Artificial Sequence
  Description of Artificial Sequence: Synthetic gluten; inner sequence
gtccgactcggcccgaagaacttgtcacagc

SEQ ID NO: 40711 - DNA, 30 bp, Artificial Sequence
  Description of Artificial Sequence: Synthetic gluten; inner sequence
ccgacgacgccctgaaaggcaggcacgtac

SEQ ID NO: 40712 - DNA, 30 bp, Artificial Sequence; identical to SEQ ID NO: 28600
  Description of Artificial Sequence: Synthetic gluten; inner sequence

SEQ ID NO: 40713 - DNA, 30 bp, Artificial Sequence
  Description of Artificial Sequence: Synthetic gluten; inner sequence
tgttcacaaccctactggtcactcgcttca

SEQ ID NO: 40714 - DNA, 30 bp, Artificial Sequence; identical to SEQ ID NO: 237
  Description of Artificial Sequence: Synthetic gluten; inner sequence

SEQ ID NO: 40715 - DNA, 30 bp, Artificial Sequence
  Description of Artificial Sequence: Synthetic gluten; inner sequence
ggcctgaacttcccgtagtacgtgtcattt

SEQ ID NO: 40716 - DNA, 30 bp, Artificial Sequence; identical to SEQ ID NO: 36179
  Description of Artificial Sequence: Synthetic gluten; inner sequence

SEQ ID NO: 40717 - DNA, 30 bp, Artificial Sequence
  Description of Artificial Sequence: Synthetic gluten; inner sequence
gtacttcgactgcctatcaagtcgcatgta

SEQ ID NO: 40718 - DNA, 30 bp, Artificial Sequence
  Description of Artificial Sequence: Synthetic gluten; inner sequence
acgagccggagagaatggcaaagcgtgcta

SEQ ID NO: 40719 - DNA, 30 bp, Artificial Sequence
  Description of Artificial Sequence: Synthetic gluten; inner sequence
gacgcacgcctccctagggacatgcacgta

SEQ ID NO: 40720 - DNA, 30 bp, Artificial Sequence
  Description of Artificial Sequence: Synthetic gluten; inner sequence
ggacggatcgaacctacaagatgtcgtgga

SEQ ID NO: 40721 - DNA, 30 bp, Artificial Sequence
  Description of Artificial Sequence: Synthetic gluten; inner sequence
atcgattggcagaaagtcgtaacggcaata

SEQ ID NO: 40722 - DNA, 30 bp, Artificial Sequence
  Description of Artificial Sequence: Synthetic gluten; inner sequence
cacagaacgcgacgaagttatgtctcacac

SEQ ID NO: 40723 - DNA, 30 bp, Artificial Sequence
  Description of Artificial Sequence: Synthetic gluten; inner sequence
tggaccgagcgacctgtactcatcacagcg

SEQ ID NO: 40724 - DNA, 30 bp, Artificial Sequence; identical to SEQ ID NO: 131
  Description of Artificial Sequence: Synthetic gluten; inner sequence

SEQ ID NO: 40725 - DNA, 30 bp, Artificial Sequence
  Description of Artificial Sequence: Synthetic gluten; inner sequence
gtacgcacacgaccctcaagagtgcatgga

SEQ ID NO: 40726 - DNA, 30 bp, Artificial Sequence
  Description of Artificial Sequence: Synthetic gluten; inner sequence
ccgagcgcgacctaaagagagaagtactgc

SEQ ID NO: 40727 - DNA, 30 bp, Artificial Sequence
  Description of Artificial Sequence: Synthetic gluten; inner sequence
actttcgctgaacgttgaatagagcgatca

SEQ ID NO: 40728 - DNA, 30 bp, Artificial Sequence
  Description of Artificial Sequence: Synthetic gluten; inner sequence
gtacaatctggcctagcaagtgcgtatgta

SEQ ID NO: 40729 - DNA, 30 bp, Artificial Sequence
  Description of Artificial Sequence: Synthetic gluten; inner sequence
agcgacagagccgaagagaaaggcaattta

SEQ ID NO: 40730 - DNA, 30 bp, Artificial Sequence
  Description of Artificial Sequence: Synthetic gluten; inner sequence
ggccacgacatcagatgaacttgtctggat

SEQ ID NO: 40731 - DNA, 30 bp, Artificial Sequence
  Description of Artificial Sequence: Synthetic gluten; inner sequence
tgaacaccgtcaaccataatggacgcgctc

SEQ ID NO: 40732 - DNA, 29 bp, Artificial Sequence
  Description of Artificial Sequence: Synthetic gluten; inner sequence
tggcctgagcgaccatggactgacgtagt

SEQ ID NO: 40733 - DNA, 30 bp, Artificial Sequence; identical to SEQ ID NO: 213
  Description of Artificial Sequence: Synthetic gluten; inner sequence

SEQ ID NO: 40734 - DNA, 30 bp, Artificial Sequence
  Description of Artificial Sequence: Synthetic gluten; inner sequence
cgagactagagccgaagattcagtcagaat

SEQ ID NO: 40735 - DNA, 30 bp, Artificial Sequence
  Description of Artificial Sequence: Synthetic gluten; inner sequence
atggccgccgctgaacatggattagtcata

SEQ ID NO: 40736 - DNA, 30 bp, Artificial Sequence
  Description of Artificial Sequence: Synthetic gluten; inner sequence
ggccggaacgccactcaagtcgtgatgtgc

SEQ ID NO: 40737 - DNA, 30 bp, Artificial Sequence
  Description of Artificial Sequence: Synthetic gluten; inner sequence
ctgaacgaccgagctgagaacatggataga

SEQ ID NO: 40738 - DNA, 30 bp, Artificial Sequence
  Description of Artificial Sequence: Synthetic gluten; inner sequence
cctgagcgaaccctagtagtaggcactgta

SEQ ID NO: 40739 - DNA, 30 bp, Artificial Sequence
  Description of Artificial Sequence: Synthetic gluten; inner sequence
ccgaagatggacgaaaggtgaggtacgatg

SEQ ID NO: 40740 - DNA, 30 bp, Artificial Sequence
  Description of Artificial Sequence: Synthetic gluten; inner sequence
ggcatgcgaaacaagttcacacccgtcgct

SEQ ID NO: 40741 - DNA, 30 bp, Artificial Sequence; identical to SEQ ID NO: 118
  Description of Artificial Sequence: Synthetic gluten; inner sequence

SEQ ID NO: 40742 - DNA, 30 bp, Artificial Sequence; identical to SEQ ID NO: 4605
  Description of Artificial Sequence: Synthetic gluten; inner sequence

SEQ ID NO: 40743 - DNA, 30 bp, Artificial Sequence; identical to SEQ ID NO: 24877
  Description of Artificial Sequence: Synthetic gluten; inner sequence

SEQ ID NO: 40744 - DNA, 30 bp, Artificial Sequence
  Description of Artificial Sequence: Synthetic gluten; inner sequence
atggacttgcgaagggttctaacgctaaca

SEQ ID NO: 40745 - DNA, 30 bp, Artificial Sequence
  Description of Artificial Sequence: Synthetic gluten; inner sequence
cgaactggcatagttagattcgtacctggc

SEQ ID NO: 40746 - DNA, 30 bp, Artificial Sequence
  Description of Artificial Sequence: Synthetic gluten; inner sequence
ccgcactcggacctcaagtgtacgacggca

SEQ ID NO: 40747 - DNA, 30 bp, Artificial Sequence
  Description of Artificial Sequence: Synthetic gluten; inner sequence
acatatggccgaccgagtcactgcaatgga

SEQ ID NO: 40748 - DNA, 30 bp, Artificial Sequence
  Description of Artificial Sequence: Synthetic gluten; inner sequence
cattcgatgagcgtaggcagactaggcagg

SEQ ID NO: 40749 - DNA, 30 bp, Artificial Sequence
  Description of Artificial Sequence: Synthetic gluten; inner sequence
ggcctgatcgaaactagagagtggcgtgga

SEQ ID NO: 40750 - DNA, 30 bp, Artificial Sequence
  Description of Artificial Sequence: Synthetic gluten; inner sequence
taggtccgaagcgcaatgtaataggcacta

SEQ ID NO: 40751 - DNA, 30 bp, Artificial Sequence
  Description of Artificial Sequence: Synthetic gluten; inner sequence
ggactgagcgacggaatgcactggtcaatt

SEQ ID NO: 40752 - DNA, 30 bp, Artificial Sequence
  Description of Artificial Sequence: Synthetic gluten; inner sequence
ggcctgcgatggatgaggagctgcactagt

SEQ ID NO: 40753 - DNA, 30 bp, Artificial Sequence
  Description of Artificial Sequence: Synthetic gluten; inner sequence
ccgatcgaccgatgtcattctacggcagca

SEQ ID NO: 40754 - DNA, 30 bp, Artificial Sequence
  Description of Artificial Sequence: Synthetic gluten; inner sequence
ggccgaacgcacacgagcgagatgtcaact

SEQ ID NO: 40755 - DNA, 30 bp, Artificial Sequence
  Description of Artificial Sequence: Synthetic gluten; inner sequence
cattcgcgacccgtacatgggattgacgta

SEQ ID NO: 40756 - DNA, 30 bp, Artificial Sequence
  Description of Artificial Sequence: Synthetic gluten; inner sequence
atggccgaatcgccacaagagcatgtcgaa

SEQ ID NO: 40757 - DNA, 30 bp, Artificial Sequence
  Description of Artificial Sequence: Synthetic gluten; inner sequence
ccttcgcgaaccgtgtcagcgtacgatggc

SEQ ID NO: 40758 - DNA, 30 bp, Artificial Sequence
  Description of Artificial Sequence: Synthetic gluten; inner sequence
cgtaccgagtcagccgtaggtcactgtgga

SEQ ID NO: 40759 - DNA, 30 bp, Artificial Sequence
  Description of Artificial Sequence: Synthetic gluten; inner sequence
ggcatgcgaggaactagcaagtcgttcgtg

SEQ ID NO: 40760 - DNA, 30 bp, Artificial Sequence
  Description of Artificial Sequence: Synthetic gluten; inner sequence
cgcgcatgcaaagaagagccgaagatccct

SEQ ID NO: 40761 - DNA, 30 bp, Artificial Sequence
  Description of Artificial Sequence: Synthetic gluten; inner sequence
ccatctcgccccgtcaatgtgatcatgcac

SEQ ID NO: 40762 - DNA, 30 bp, Artificial Sequence
  Description of Artificial Sequence: Synthetic gluten; inner sequence
gcagtcagatggacgacgagttcactaggt

SEQ ID NO: 40763 - DNA, 30 bp, Artificial Sequence
  Description of Artificial Sequence: Synthetic gluten; inner sequence
ggcatgcgctgggtagtgatcacgtacggc

SEQ ID NO: 40764 - DNA, 30 bp, Artificial Sequence
  Description of Artificial Sequence: Synthetic gluten; inner sequence
ggccgacctggatgtgagcatgcatctaga

SEQ ID NO: 40765 - DNA, 30 bp, Artificial Sequence; identical to SEQ ID NO: 4924
  Description of Artificial Sequence: Synthetic gluten; inner sequence

SEQ ID NO: 40766 - DNA, 31 bp, Artificial Sequence
  Description of Artificial Sequence: Synthetic gluten; inner sequence
ggcctgcgatggatgtgatcgtgcaatagtc

SEQ ID NO: 40767 - DNA, 30 bp, Artificial Sequence
  Description of Artificial Sequence: Synthetic gluten; inner sequence
tgtcctgcgcgacctacgagtgggatggta

SEQ ID NO: 40768 - DNA, 30 bp, Artificial Sequence
  Description of Artificial Sequence: Synthetic gluten; inner sequence
cgcacctactacatgcattaataaggtgta

SEQ ID NO: 40769 - DNA, 30 bp, Artificial Sequence
  Description of Artificial Sequence: Synthetic gluten; inner sequence
gaacgcacgatgagcgccaagtgacatgga

SEQ ID NO: 40770 - DNA, 30 bp, Artificial Sequence
  Description of Artificial Sequence: Synthetic gluten; inner sequence
ggcctgctcgaacctagagagtggcgtgga

SEQ ID NO: 40771 - DNA, 30 bp, Artificial Sequence
  Description of Artificial Sequence: Synthetic gluten; inner sequence
atggacgaacgagcccaagtgcgccatgga

SEQ ID NO: 40772 - DNA, 30 bp, Artificial Sequence; identical to SEQ ID NO: 36546
  Description of Artificial Sequence: Synthetic gluten; inner sequence

SEQ ID NO: 40773 - DNA, 30 bp, Artificial Sequence
  Description of Artificial Sequence: Synthetic gluten; inner sequence
aggccgcactcgtcacgcaatggccatgga

SEQ ID NO: 40774 - DNA, 30 bp, Artificial Sequence
  Description of Artificial Sequence: Synthetic gluten; inner sequence
ggcatgcgaagtccagtggattgtgctcgt

SEQ ID NO: 40775 - DNA, 30 bp, Artificial Sequence
  Description of Artificial Sequence: Synthetic gluten; inner sequence
catgcacgaactaacaggggactcctcata

SEQ ID NO: 40776 - DNA, 30 bp, Artificial Sequence
  Description of Artificial Sequence: Synthetic gluten; inner sequence
ccatcagatggccgagtcgagtgatggtcg

SEQ ID NO: 40777 - DNA, 29 bp, Artificial Sequence
  Description of Artificial Sequence: Synthetic gluten; inner sequence
ccaatcacatggccgatctggatgtgtgt

SEQ ID NO: 40778 - DNA, 30 bp, Artificial Sequence
  Description of Artificial Sequence: Synthetic gluten; inner sequence
cttcccgcagaacatggcccgaacgtcatc

SEQ ID NO: 40779 - DNA, 30 bp, Artificial Sequence
  Description of Artificial Sequence: Synthetic gluten; inner sequence
ccgatcgaccaaagaacatcgtgcgacggt

SEQ ID NO: 40780 - DNA, 30 bp, Artificial Sequence
  Description of Artificial Sequence: Synthetic gluten; inner sequence
gtcatgcgcgtaccgtcaagtgcgaatgga

SEQ ID NO: 40781 - DNA, 30 bp, Artificial Sequence
  Description of Artificial Sequence: Synthetic gluten; inner sequence
tggcctgcgagtacctgtgatagtccttga

SEQ ID NO: 40782 - DNA, 30 bp, Artificial Sequence
  Description of Artificial Sequence: Synthetic gluten; inner sequence
gtcattcgctgaacgttcaagggacgtgga

SEQ ID NO: 40783 - DNA, 30 bp, Artificial Sequence
  Description of Artificial Sequence: Synthetic gluten; inner sequence
catgtcgccaagagcacgtatgtcgtcata

SEQ ID NO: 40784 - DNA, 30 bp, Artificial Sequence
  Description of Artificial Sequence: Synthetic gluten; inner sequence
ggcatgcgctgggtagcgatcacgtacggt

SEQ ID NO: 40785 - DNA, 30 bp, Artificial Sequence
  Description of Artificial Sequence: Synthetic gluten; inner sequence
ccgaagcgagcctaggtctttacgctggct

SEQ ID NO: 40786 - DNA, 30 bp, Artificial Sequence
  Description of Artificial Sequence: Synthetic gluten; inner sequence
acaatcacaattgacaaaacgtgcatgctg

SEQ ID NO: 40787 - DNA, 30 bp, Artificial Sequence
  Description of Artificial Sequence: Synthetic gluten; inner sequence
cgcacgttacggaggataacggtatgggta

SEQ ID NO: 40788 - DNA, 30 bp, Artificial Sequence
  Description of Artificial Sequence: Synthetic gluten; inner sequence
ggactgaacgcaccgaaatgtcaggacgca

SEQ ID NO: 40789 - DNA, 30 bp, Artificial Sequence
  Description of Artificial Sequence: Synthetic gluten; inner sequence
ccgacaatgaccgtaatgagagcatgcgac

SEQ ID NO: 40790 - DNA, 30 bp, Artificial Sequence
  Description of Artificial Sequence: Synthetic gluten; inner sequence
ccgttgatggactaaaggtgactactaagc

SEQ ID NO: 40791 - DNA, 30 bp, Artificial Sequence
  Description of Artificial Sequence: Synthetic gluten; inner sequence
ggcctgcgctgggtagtgatcacgtacggt

SEQ ID NO: 40792 - DNA, 30 bp, Artificial Sequence
  Description of Artificial Sequence: Synthetic gluten; inner sequence
caacaccactgcagtagattatggctcacg

SEQ ID NO: 40793 - DNA, 29 bp, Artificial Sequence
  Description of Artificial Sequence: Synthetic gluten; inner sequence
tggccaagcgacctagcaagtgcagcatg

SEQ ID NO: 40794 - DNA, 30 bp, Artificial Sequence
  Description of Artificial Sequence: Synthetic gluten; inner sequence
acgtccgacgaatgaggactagaggttggg

SEQ ID NO: 40795 - DNA, 30 bp, Artificial Sequence; identical to SEQ ID NO: 364
  Description of Artificial Sequence: Synthetic gluten; inner sequence

SEQ ID NO: 40796 - DNA, 30 bp, Artificial Sequence
  Description of Artificial Sequence: Synthetic gluten; inner sequence
ggccggctataccctacacgtgatcaggta

SEQ ID NO: 40797 - DNA, 29 bp, Artificial Sequence
  Description of Artificial Sequence: Synthetic gluten; inner sequence
gtacgacgcggaccttcaagtcggccatg

SEQ ID NO: 40798 - DNA, 30 bp, Artificial Sequence
  Description of Artificial Sequence: Synthetic gluten; inner sequence
catgtacgctaacggcaagcaatgctcata

SEQ ID NO: 40799 - DNA, 30 bp, Artificial Sequence
  Description of Artificial Sequence: Synthetic gluten; inner sequence
ggactgctcagcacaaacgtgggcactgga

SEQ ID NO: 40800 - DNA, 30 bp, Artificial Sequence
  Description of Artificial Sequence: Synthetic gluten; inner sequence
ggacgacgatgaccggaatcaagcgtgtca

SEQ ID NO: 40801 - DNA, 30 bp, Artificial Sequence
  Description of Artificial Sequence: Synthetic gluten; inner sequence
gtacgcaacgaaccgcaaggggatgtggac

SEQ ID NO: 40802 - DNA, 30 bp, Artificial Sequence
  Description of Artificial Sequence: Synthetic gluten; inner sequence
tgacgtgcaggataagaacatggcctgagc

SEQ ID NO: 40803 - DNA, 30 bp, Artificial Sequence
  Description of Artificial Sequence: Synthetic gluten; inner sequence
ccgactcggaaaggtacgtacggagattca

SEQ ID NO: 40804 - DNA, 30 bp, Artificial Sequence; identical to SEQ ID NO: 684
  Description of Artificial Sequence: Synthetic gluten; inner sequence

SEQ ID NO: 40805 - DNA, 30 bp, Artificial Sequence
  Description of Artificial Sequence: Synthetic gluten; inner sequence
ccgatcgacctcgtgtcaggtgcacagtca

SEQ ID NO: 40806 - DNA, 30 bp, Artificial Sequence
  Description of Artificial Sequence: Synthetic gluten; inner sequence
tcatgccctgaacgctaatggacgacggga

SEQ ID NO: 40807 - DNA, 30 bp, Artificial Sequence
  Description of Artificial Sequence: Synthetic gluten; inner sequence
cgcaccagcgatatgttgattagtacatcc

SEQ ID NO: 40808 - DNA, 30 bp, Artificial Sequence
  Description of Artificial Sequence: Synthetic gluten; inner sequence
agtgatcacaaagagcagacttgggcatct

SEQ ID NO: 40809 - DNA, 30 bp, Artificial Sequence
  Description of Artificial Sequence: Synthetic gluten; inner sequence
acgaacagagccgaagagccttaagcaagc

SEQ ID NO: 40810 - DNA, 30 bp, Artificial Sequence
  Description of Artificial Sequence: Synthetic gluten; inner sequence
gcgcagcagcagtagtcatgctctgggatg

SEQ ID NO: 40811 - DNA, 30 bp, Artificial Sequence
  Description of Artificial Sequence: Synthetic gluten; inner sequence
tggccgacgattcccgttggacgaggcctt

SEQ ID NO: 40812 - DNA, 30 bp, Artificial Sequence
  Description of Artificial Sequence: Synthetic gluten; inner sequence
tcaacgtatgcctgaagaggacgcacaagg

SEQ ID NO: 40813 - DNA, 29 bp, Artificial Sequence
  Description of Artificial Sequence: Synthetic gluten; inner sequence
ggcctgcgatggatgtgggatggtctagc

SEQ ID NO: 40814 - DNA, 30 bp, Artificial Sequence
  Description of Artificial Sequence: Synthetic gluten; inner sequence
tcgagcacagatagagcatatggcacgatc

SEQ ID NO: 40815 - DNA, 30 bp, Artificial Sequence
  Description of Artificial Sequence: Synthetic gluten; inner sequence
ggacagaacgaccgatcaagtgcgggtgta

SEQ ID NO: 40816 - DNA, 30 bp, Artificial Sequence
  Description of Artificial Sequence: Synthetic gluten; inner sequence
gcacaagtcgccagtctgatccgagctcac

SEQ ID NO: 40817 - DNA, 30 bp, Artificial Sequence
  Description of Artificial Sequence: Synthetic gluten; inner sequence
ccgagcggaaactgaattccatgcagtgtc

SEQ ID NO: 40818 - DNA, 30 bp, Artificial Sequence
  Description of Artificial Sequence: Synthetic gluten; inner sequence
ccgaacgtacctgagaagcatagtccgatc

SEQ ID NO: 40819 - DNA, 30 bp, Artificial Sequence
  Description of Artificial Sequence: Synthetic gluten; inner sequence
cgtcagcatgacgaagatttgagccggaga

SEQ ID NO: 40820 - DNA, 30 bp, Artificial Sequence
  Description of Artificial Sequence: Synthetic gluten; inner sequence
gaactgcgatggaatgggctgtatgcgtct

SEQ ID NO: 40821 - DNA, 30 bp, Artificial Sequence
  Description of Artificial Sequence: Synthetic gluten; inner sequence
catgtacataccgagacaatcttgttcata

SEQ ID NO: 40822 - DNA, 30 bp, Artificial Sequence
  Description of Artificial Sequence: Synthetic gluten; inner sequence
ggcatgcgatgcactacaagttgttgtgta

SEQ ID NO: 40823 - DNA, 30 bp, Artificial Sequence
  Description of Artificial Sequence: Synthetic gluten; inner sequence
ccgaacgcgcccttcaagtgcatggctgtc

SEQ ID NO: 40824 - DNA, 30 bp, Artificial Sequence
  Description of Artificial Sequence: Synthetic gluten; inner sequence
ggcctgatcgaacctcaagctggacatgga

SEQ ID NO: 40825 - DNA, 30 bp, Artificial Sequence
  Description of Artificial Sequence: Synthetic gluten; inner sequence
ggcctgagctgcactagtagagtcaaatta

SEQ ID NO: 40826 - DNA, 30 bp, Artificial Sequence
  Description of Artificial Sequence: Synthetic gluten; inner sequence
cgtaccgcaagtgacgtgtccgtgccggga

SEQ ID NO: 40827 - DNA, 30 bp, Artificial Sequence
  Description of Artificial Sequence: Synthetic gluten; inner sequence
cctgagcgaccgtagacctgtctagacaca

SEQ ID NO: 40828 - DNA, 30 bp, Artificial Sequence; identical to SEQ ID NO: 4721
  Description of Artificial Sequence: Synthetic gluten; inner sequence

SEQ ID NO: 40829 - DNA, 30 bp, Artificial Sequence
  Description of Artificial Sequence: Synthetic gluten; inner sequence
ggacgcaacgtaccgcatcgtggccatgtg

SEQ ID NO: 40830 - DNA, 30 bp, Artificial Sequence
  Description of Artificial Sequence: Synthetic gluten; inner sequence
ccgcacagggcattgaaaatctcctacggc

SEQ ID NO: 40831 - DNA, 30 bp, Artificial Sequence
  Description of Artificial Sequence: Synthetic gluten; inner sequence
ggccgatgctgcactagtctcaagttgtca

SEQ ID NO: 40832 - DNA, 30 bp, Artificial Sequence; identical to SEQ ID NO: 4616
  Description of Artificial Sequence: Synthetic gluten; inner sequence

SEQ ID NO: 40833 - DNA, 30 bp, Artificial Sequence
  Description of Artificial Sequence: Synthetic gluten; inner sequence
ggccgaagcttccctattcgtacggcagca

SEQ ID NO: 40834 - DNA, 30 bp, Artificial Sequence
  Description of Artificial Sequence: Synthetic gluten; inner sequence
tggccggatctgacctgtccctagttgcga

SEQ ID NO: 40835 - DNA, 30 bp, Artificial Sequence
  Description of Artificial Sequence: Synthetic gluten; inner sequence
gtcatgcgcggacattccagttggcgtgga

SEQ ID NO: 40836 - DNA, 30 bp, Artificial Sequence; identical to SEQ ID NO: 4713
  Description of Artificial Sequence: Synthetic gluten; inner sequence

SEQ ID NO: 40837 - DNA, 30 bp, Artificial Sequence
  Description of Artificial Sequence: Synthetic gluten; inner sequence
cgtaccgcaagtgacgtgtccgagccgtga

SEQ ID NO: 40838 - DNA, 30 bp, Artificial Sequence
  Description of Artificial Sequence: Synthetic gluten; inner sequence
ccacatgccgtatcggtttgcggactaaca

SEQ ID NO: 40839 - DNA, 30 bp, Artificial Sequence
  Description of Artificial Sequence: Synthetic gluten; inner sequence
tggcctgctcgacctgtatcaggcactagg

SEQ ID NO: 40840 - DNA, 30 bp, Artificial Sequence
  Description of Artificial Sequence: Synthetic gluten; inner sequence
ggactgaacgaccgaattacgcttgtcaca

SEQ ID NO: 40841 - DNA, 30 bp, Artificial Sequence
  Description of Artificial Sequence: Synthetic gluten; inner sequence
ggactgcgcgtgacctatcaatggcatgca

SEQ ID NO: 40842 - DNA, 30 bp, Artificial Sequence
  Description of Artificial Sequence: Synthetic gluten; inner sequence
gtacgcacgctgagcgccaagtgacatgga

SEQ ID NO: 40843 - DNA, 30 bp, Artificial Sequence
  Description of Artificial Sequence: Synthetic gluten; inner sequence
ggaacgcacgaagccctgtactaaggcaaa

SEQ ID NO: 40844 - DNA, 30 bp, Artificial Sequence
  Description of Artificial Sequence: Synthetic gluten; inner sequence
cgtaccgcaagtgacgagtccgtgccgtga

SEQ ID NO: 40845 - DNA, 30 bp, Artificial Sequence; identical to SEQ ID NO: 4700
  Description of Artificial Sequence: Synthetic gluten; inner sequence

SEQ ID NO: 40846 - DNA, 30 bp, Artificial Sequence
  Description of Artificial Sequence: Synthetic gluten; inner sequence
ccgtaccgtcgcaagtgctatcttccgatc

SEQ ID NO: 40847 - DNA, 30 bp, Artificial Sequence
  Description of Artificial Sequence: Synthetic gluten; inner sequence
cgaagcatgtcaagagccgaagacaccata

SEQ ID NO: 40848 - DNA, 30 bp, Artificial Sequence
  Description of Artificial Sequence: Synthetic gluten; inner sequence
gacagcggagcgggagcacaagagtggcat

SEQ ID NO: 40849 - DNA, 30 bp, Artificial Sequence
  Description of Artificial Sequence: Synthetic gluten; inner sequence
ggcatgcgatctcactatcaagtgttggca

SEQ ID NO: 40850 - DNA, 30 bp, Artificial Sequence
  Description of Artificial Sequence: Synthetic gluten; inner sequence
ggccacgcctgccctaccagtgctcatgga

SEQ ID NO: 40851 - DNA, 30 bp, Artificial Sequence
  Description of Artificial Sequence: Synthetic gluten; inner sequence
tcagatggcctcatcgtcactatctagtca

SEQ ID NO: 40852 - DNA, 30 bp, Artificial Sequence; identical to SEQ ID NO: 164
  Description of Artificial Sequence: Synthetic gluten; inner sequence

SEQ ID NO: 40853 - DNA, 30 bp, Artificial Sequence
  Description of Artificial Sequence: Synthetic gluten; inner sequence
cgaacgacctaaacgtcagaataggcagta

SEQ ID NO: 40854 - DNA, 30 bp, Artificial Sequence
  Description of Artificial Sequence: Synthetic gluten; inner sequence
tgagatcaccgcaagacaaggggacggcga

SEQ ID NO: 40855 - DNA, 30 bp, Artificial Sequence
  Description of Artificial Sequence: Synthetic gluten; inner sequence
ggccgaactcgtccccttaacgtacgtggc

SEQ ID NO: 40856 - DNA, 30 bp, Artificial Sequence
  Description of Artificial Sequence: Synthetic gluten; inner sequence
aatatggccgccgaggaagtactatcaatg

SEQ ID NO: 40857 - DNA, 30 bp, Artificial Sequence
  Description of Artificial Sequence: Synthetic gluten; inner sequence
tgtccgacacttcacgctgagatcgtactg

SEQ ID NO: 40858 - DNA, 30 bp, Artificial Sequence
  Description of Artificial Sequence: Synthetic gluten; inner sequence
accgtcatgcgaaagtcatatctcggcccg

SEQ ID NO: 40859 - DNA, 30 bp, Artificial Sequence; identical to SEQ ID NO: 36602
  Description of Artificial Sequence: Synthetic gluten; inner sequence

SEQ ID NO: 40860 - DNA, 30 bp, Artificial Sequence
  Description of Artificial Sequence: Synthetic gluten; inner sequence
cgtatggtcgagcgtaccttcaaggagtca

SEQ ID NO: 40861 - DNA, 30 bp, Artificial Sequence
  Description of Artificial Sequence: Synthetic gluten; inner sequence
catgacgtgtgaagcagccatgctgtcata

SEQ ID NO: 40862 - DNA, 30 bp, Artificial Sequence
  Description of Artificial Sequence: Synthetic gluten; inner sequence
cctgatcaggcatagatgaccggcaacgga

SEQ ID NO: 40863 - DNA, 29 bp, Artificial Sequence
  Description of Artificial Sequence: Synthetic gluten; inner sequence
ccgtatcgtaccgtacatgtgcgtatcaa

SEQ ID NO: 40864 - DNA, 30 bp, Artificial Sequence
  Description of Artificial Sequence: Synthetic gluten; inner sequence
cctgaacggccctacagagcgtacgaagca

SEQ ID NO: 40865 - DNA, 29 bp, Artificial Sequence
  Description of Artificial Sequence: Synthetic gluten; inner sequence
tgacctgagctgaacgaagaccgctagtc

SEQ ID NO: 40866 - DNA, 30 bp, Artificial Sequence
  Description of Artificial Sequence: Synthetic gluten; inner sequence
cgtgacaaacaaggatctaccagcttcgcc

SEQ ID NO: 40867 - DNA, 30 bp, Artificial Sequence
  Description of Artificial Sequence: Synthetic gluten; inner sequence
tgtccagatcgacctacatgtctaggcaat

SEQ ID NO: 40868 - DNA, 30 bp, Artificial Sequence
  Description of Artificial Sequence: Synthetic gluten; inner sequence
tggccgactgacctagcagagcatggcatc

SEQ ID NO: 40869 - DNA, 30 bp, Artificial Sequence; identical to SEQ ID NO: 36927
  Description of Artificial Sequence: Synthetic gluten; inner sequence

SEQ ID NO: 40870 - DNA, 30 bp, Artificial Sequence; identical to SEQ ID NO: 97
  Description of Artificial Sequence: Synthetic gluten; inner sequence

SEQ ID NO: 40871 - DNA, 30 bp, Artificial Sequence
  Description of Artificial Sequence: Synthetic gluten; inner sequence
ctgagccgaagatcctgtctttactcatga

SEQ ID NO: 40872 - DNA, 30 bp, Artificial Sequence; identical to SEQ ID NO: 36514
  Description of Artificial Sequence: Synthetic gluten; inner sequence

SEQ ID NO: 40873 - DNA, 30 bp, Artificial Sequence
  Description of Artificial Sequence: Synthetic gluten; inner sequence
ggacgacctggatgtgagcatgcatctagt

SEQ ID NO: 40874 - DNA, 30 bp, Artificial Sequence
  Description of Artificial Sequence: Synthetic gluten; inner sequence
ttggcatgcgatggaaggtcagctagttca

SEQ ID NO: 40875 - DNA, 30 bp, Artificial Sequence
  Description of Artificial Sequence: Synthetic gluten; inner sequence
ttggcctgagctgaactgttaaatgtgtgt

SEQ ID NO: 40876 - DNA, 30 bp, Artificial Sequence
  Description of Artificial Sequence: Synthetic gluten; inner sequence
cgcatagggccgagacagctacgactagtg

SEQ ID NO: 40877 - DNA, 30 bp, Artificial Sequence; identical to SEQ ID NO: 4798
  Description of Artificial Sequence: Synthetic gluten; inner sequence

SEQ ID NO: 40878 - DNA, 30 bp, Artificial Sequence
  Description of Artificial Sequence: Synthetic gluten; inner sequence
ccgacgatgaactatgtacttagtgtctga

SEQ ID NO: 40879 - DNA, 30 bp, Artificial Sequence
  Description of Artificial Sequence: Synthetic gluten; inner sequence
cacatcaaataggcctgagcgtatggacta

SEQ ID NO: 40880 - DNA, 30 bp, Artificial Sequence
  Description of Artificial Sequence: Synthetic gluten; inner sequence
gacgactcgaaccaaggaaatggactgggc

SEQ ID NO: 40881 - DNA, 30 bp, Artificial Sequence
  Description of Artificial Sequence: Synthetic gluten; inner sequence
gctccagatcgcaccttcaagttcggcatg

SEQ ID NO: 40882 - DNA, 30 bp, Artificial Sequence
  Description of Artificial Sequence: Synthetic gluten; inner sequence
tggcctgagcgaccacatgtctgtcaatcg

SEQ ID NO: 40883 - DNA, 30 bp, Artificial Sequence
  Description of Artificial Sequence: Synthetic gluten; inner sequence
cgtaacgtcggtaaccttgaagcggtaagt

SEQ ID NO: 40884 - DNA, 30 bp, Artificial Sequence; identical to SEQ ID NO: 635
  Description of Artificial Sequence: Synthetic gluten; inner sequence

SEQ ID NO: 40885 - DNA, 30 bp, Artificial Sequence
  Description of Artificial Sequence: Synthetic gluten; inner sequence
tcgtaccgtcaaagtgcttggatcttcagg

SEQ ID NO: 40886 - DNA, 30 bp, Artificial Sequence
  Description of Artificial Sequence: Synthetic gluten; inner sequence
tggactgctattcacggcgagaatgtcaat

SEQ ID NO: 40887 - DNA, 29 bp, Artificial Sequence
  Description of Artificial Sequence: Synthetic gluten; inner sequence
ggcatgcgatggatgtggatggccagtct

SEQ ID NO: 40888 - DNA, 30 bp, Artificial Sequence; identical to SEQ ID NO: 4722
  Description of Artificial Sequence: Synthetic gluten; inner sequence

SEQ ID NO: 40889 - DNA, 30 bp, Artificial Sequence
  Description of Artificial Sequence: Synthetic gluten; inner sequence
ccgaatcgacctcaagaacactgctcgacg

SEQ ID NO: 40890 - DNA, 30 bp, Artificial Sequence
  Description of Artificial Sequence: Synthetic gluten; inner sequence
tggccgaagcttccctagagacggacgtat

SEQ ID NO: 40891 - DNA, 30 bp, Artificial Sequence
  Description of Artificial Sequence: Synthetic gluten; inner sequence
cgaccgacaaacactaattggcatcggggt

SEQ ID NO: 40892 - DNA, 30 bp, Artificial Sequence
  Description of Artificial Sequence: Synthetic gluten; inner sequence
atgcctgcgatgaccgtggcatgcactata

SEQ ID NO: 40893 - DNA, 30 bp, Artificial Sequence
  Description of Artificial Sequence: Synthetic gluten; inner sequence
tgagcaacgcgaagaatagggctgttcgaa

SEQ ID NO: 40894 - DNA, 30 bp, Artificial Sequence
  Description of Artificial Sequence: Synthetic gluten; inner sequence
gtacgtcgacagacctcaagttggcgtgta

SEQ ID NO: 40895 - DNA, 30 bp, Artificial Sequence
  Description of Artificial Sequence: Synthetic gluten; inner sequence
tgtcatgcgatgaactggcgtggtccttgc

SEQ ID NO: 40896 - DNA, 30 bp, Artificial Sequence
  Description of Artificial Sequence: Synthetic gluten; inner sequence
cctgctcgaccgtcaagtgaaatggcgctg

SEQ ID NO: 40897 - DNA, 29 bp, Artificial Sequence
  Description of Artificial Sequence: Synthetic gluten; inner sequence
ctatcacatggcctgcctacttactgtca

SEQ ID NO: 40898 - DNA, 30 bp, Artificial Sequence
  Description of Artificial Sequence: Synthetic gluten; inner sequence
catccccaacgatcggcatatggcattcga

SEQ ID NO: 40899 - DNA, 30 bp, Artificial Sequence; identical to SEQ ID NO: 28272
  Description of Artificial Sequence: Synthetic gluten; inner sequence

SEQ ID NO: 40900 - DNA, 30 bp, Artificial Sequence
  Description of Artificial Sequence: Synthetic gluten; inner sequence
acattgccgcaatgggaatatgaactgcgc

SEQ ID NO: 40901 - DNA, 30 bp, Artificial Sequence
  Description of Artificial Sequence: Synthetic gluten; inner sequence
agcaactcactacaagatcatttccgccgg

SEQ ID NO: 40902 - DNA, 30 bp, Artificial Sequence
  Description of Artificial Sequence: Synthetic gluten; inner sequence
cgatgaggcgaagcaatctgacggggtcaa

SEQ ID NO: 40903 - DNA, 30 bp, Artificial Sequence
  Description of Artificial Sequence: Synthetic gluten; inner sequence
ggcctgatcgaacctagagagtggcgggga

SEQ ID NO: 40904 - DNA, 30 bp, Artificial Sequence
  Description of Artificial Sequence: Synthetic gluten; inner sequence
cagatggccgaagctgcactacatgtggac

SEQ ID NO: 40905 - DNA, 30 bp, Artificial Sequence
  Description of Artificial Sequence: Synthetic gluten; inner sequence
cgacctgggtgaaccgaagatgctgtcaca

SEQ ID NO: 40906 - DNA, 30 bp, Artificial Sequence
  Description of Artificial Sequence: Synthetic gluten; inner sequence
ggcctgcgctggaatgtgcgaatgtacgca

SEQ ID NO: 40907 - DNA, 26 bp, Artificial Sequence
  Description of Artificial Sequence: Synthetic gluten; inner sequence
ggcattcgatgcactacaagtcgtca

SEQ ID NO: 40908 - DNA, 30 bp, Artificial Sequence
  Description of Artificial Sequence: Synthetic gluten; inner sequence
ggcctgatcgaacctagagtgtggcgtgga

SEQ ID NO: 40909 - DNA, 30 bp, Artificial Sequence
  Description of Artificial Sequence: Synthetic gluten; inner sequence
ggcatgacgcattccctaaagtggcaggta

SEQ ID NO: 40910 - DNA, 30 bp, Artificial Sequence
  Description of Artificial Sequence: Synthetic gluten; inner sequence
ggcctgatcgaacctagagagtggtgtgga

SEQ ID NO: 40911 - DNA, 30 bp, Artificial Sequence
  Description of Artificial Sequence: Synthetic gluten; inner sequence
ggccgacgatggatgtggatgtattggtct

SEQ ID NO: 40912 - DNA, 30 bp, Artificial Sequence; identical to SEQ ID NO: 36504
  Description of Artificial Sequence: Synthetic gluten; inner sequence

SEQ ID NO: 40913 - DNA, 30 bp, Artificial Sequence
  Description of Artificial Sequence: Synthetic gluten; inner sequence
gccagcagaggacttcaaggtgagtacata

SEQ ID NO: 40914 - DNA, 30 bp, Artificial Sequence
  Description of Artificial Sequence: Synthetic gluten; inner sequence
agaactcgtgtacgtggagagagatccgga

SEQ ID NO: 40915 - DNA, 30 bp, Artificial Sequence
  Description of Artificial Sequence: Synthetic gluten; inner sequence
acgcaccacgatgaggatccgctcttcacg

SEQ ID NO: 40916 - DNA, 30 bp, Artificial Sequence
  Description of Artificial Sequence: Synthetic gluten; inner sequence
ggcatgcgctgggtagtgatcacgtacggg

SEQ ID NO: 40917 - DNA, 30 bp, Artificial Sequence
  Description of Artificial Sequence: Synthetic gluten; inner sequence
gtcatgatcggatgtggatgtggactcgac

SEQ ID NO: 40918 - DNA, 30 bp, Artificial Sequence; identical to SEQ ID NO: 4688
  Description of Artificial Sequence: Synthetic gluten; inner sequence

SEQ ID NO: 40919 - DNA, 30 bp, Artificial Sequence
  Description of Artificial Sequence: Synthetic gluten; inner sequence
gtacgacgcggaccttcaagtaggcgcgta

SEQ ID NO: 40920 - DNA, 30 bp, Artificial Sequence
  Description of Artificial Sequence: Synthetic gluten; inner sequence
ggcattcgatgcactacaagttgttgtgca

SEQ ID NO: 40921 - DNA, 30 bp, Artificial Sequence; identical to SEQ ID NO: 4710
  Description of Artificial Sequence: Synthetic gluten; inner sequence

SEQ ID NO: 40922 - DNA, 30 bp, Artificial Sequence
  Description of Artificial Sequence: Synthetic gluten; inner sequence
ccaatcgaccgcgtggacttgcactgggcc

SEQ ID NO: 40923 - DNA, 30 bp, Artificial Sequence
  Description of Artificial Sequence: Synthetic gluten; inner sequence
ggcatgacgcgaccccttcaagctgtgtca

SEQ ID NO: 40924 - DNA, 30 bp, Artificial Sequence
  Description of Artificial Sequence: Synthetic gluten; inner sequence
tccatcacaggtccggagaacggctacgac

SEQ ID NO: 40925 - DNA, 30 bp, Artificial Sequence
  Description of Artificial Sequence: Synthetic gluten; inner sequence
cgacagagcgaatggcaatctccagtcaca

SEQ ID NO: 40926 - DNA, 30 bp, Artificial Sequence
  Description of Artificial Sequence: Synthetic gluten; inner sequence
taatccaagatgcagcagatggacgacctc

SEQ ID NO: 40927 - DNA, 30 bp, Artificial Sequence
  Description of Artificial Sequence: Synthetic gluten; inner sequence
ggccgatcgtacctggtgatgtgcgtatcc

SEQ ID NO: 40928 - DNA, 30 bp, Artificial Sequence; identical to SEQ ID NO: 972
  Description of Artificial Sequence: Synthetic gluten; inner sequence

SEQ ID NO: 40929 - DNA, 30 bp, Artificial Sequence
  Description of Artificial Sequence: Synthetic gluten; inner sequence
acgatctggacacagctgacaggaacgcaa

SEQ ID NO: 40930 - DNA, 30 bp, Artificial Sequence
  Description of Artificial Sequence: Synthetic gluten; inner sequence
ggccgtgggagaaactagcgctacgtacga

SEQ ID NO: 40931 - DNA, 30 bp, Artificial Sequence
  Description of Artificial Sequence: Synthetic gluten; inner sequence
acttcgcgaccctagcatgctacgtacgtt

SEQ ID NO: 40932 - DNA, 30 bp, Artificial Sequence
  Description of Artificial Sequence: Synthetic gluten; inner sequence
tggcctgagcgaaactagtactagccatgc

SEQ ID NO: 40933 - DNA, 30 bp, Artificial Sequence
  Description of Artificial Sequence: Synthetic gluten; inner sequence
cccatcagatggcctaatctgagtcaggca

SEQ ID NO: 40934 - DNA, 30 bp, Artificial Sequence
  Description of Artificial Sequence: Synthetic gluten; inner sequence
ggcccgactccctatcagtggcacgtacta

SEQ ID NO: 40935 - DNA, 30 bp, Artificial Sequence
  Description of Artificial Sequence: Synthetic gluten; inner sequence
cgaaccagagagcagttctaggcaatctca

SEQ ID NO: 40936 - DNA, 30 bp, Artificial Sequence
  Description of Artificial Sequence: Synthetic gluten; inner sequence
ggcatgctctgaccgaacgtgctaatggct

SEQ ID NO: 40937 - DNA, 30 bp, Artificial Sequence
  Description of Artificial Sequence: Synthetic gluten; inner sequence
catggcgaagggggcagtcacctgctcata

SEQ ID NO: 40938 - DNA, 30 bp, Artificial Sequence
  Description of Artificial Sequence: Synthetic gluten; inner sequence
ggcccgaatcccttcaagatgggcgatgga

SEQ ID NO: 40939 - DNA, 30 bp, Artificial Sequence
  Description of Artificial Sequence: Synthetic gluten; inner sequence
acttctcggaacggcatgtgaatcgtcgaa

SEQ ID NO: 40940 - DNA, 30 bp, Artificial Sequence
  Description of Artificial Sequence: Synthetic gluten; inner sequence
cctcatacggccgactctgagtgcaagtta

SEQ ID NO: 40941 - DNA, 30 bp, Artificial Sequence
  Description of Artificial Sequence: Synthetic gluten; inner sequence
tcacagcatggtggatttgcaaaccctcaa

SEQ ID NO: 40942 - DNA, 30 bp, Artificial Sequence
  Description of Artificial Sequence: Synthetic gluten; inner sequence
tgcaacgcggcttgcttcctactaccgtcc

SEQ ID NO: 40943 - DNA, 30 bp, Artificial Sequence
  Description of Artificial Sequence: Synthetic gluten; inner sequence
ggcctgcgatgaccgtcaagctaacttgcg

SEQ ID NO: 40944 - DNA, 30 bp, Artificial Sequence
  Description of Artificial Sequence: Synthetic gluten; inner sequence
ccgattgacataccgaccggatcagcatga

SEQ ID NO: 40945 - DNA, 30 bp, Artificial Sequence
  Description of Artificial Sequence: Synthetic gluten; inner sequence
tgactgaacgaaccgtccatgaacgtaggt

SEQ ID NO: 40946 - DNA, 30 bp, Artificial Sequence
  Description of Artificial Sequence: Synthetic gluten; inner sequence
gctccgacgatggaaggacgtggcagtcaa

SEQ ID NO: 40947 - DNA, 30 bp, Artificial Sequence
  Description of Artificial Sequence: Synthetic gluten; inner sequence
acatggcctgaacgaaatcgacggcacttg

SEQ ID NO: 40948 - DNA, 30 bp, Artificial Sequence
  Description of Artificial Sequence: Synthetic gluten; inner sequence
gatgagccgaagagagggaaatagggacta

SEQ ID NO: 40949 - DNA, 30 bp, Artificial Sequence
  Description of Artificial Sequence: Synthetic gluten; inner sequence
cgtcctgagctgaccgtctgtctctggcat

SEQ ID NO: 40950 - DNA, 30 bp, Artificial Sequence
  Description of Artificial Sequence: Synthetic gluten; inner sequence
gaactgaacgcaccgttttctaggcaagca

SEQ ID NO: 40951 - DNA, 30 bp, Artificial Sequence; identical to SEQ ID NO: 4925
  Description of Artificial Sequence: Synthetic gluten; inner sequence

SEQ ID NO: 40952 - DNA, 30 bp, Artificial Sequence
  Description of Artificial Sequence: Synthetic gluten; inner sequence
ggcctgatcgaacctagagagcggcgtggg

SEQ ID NO: 40953 - DNA, 30 bp, Artificial Sequence
  Description of Artificial Sequence: Synthetic gluten; inner sequence
cgcaagccgtagtaaatcataccgagaggc

SEQ ID NO: 40954 - DNA, 30 bp, Artificial Sequence
  Description of Artificial Sequence: Synthetic gluten; inner sequence
ggcctgcgatggaatgagcgaatgtacgca

SEQ ID NO: 40955 - DNA, 30 bp, Artificial Sequence
  Description of Artificial Sequence: Synthetic gluten; inner sequence
catgtggccgactgaactagcaagctggtc

SEQ ID NO: 40956 - DNA, 30 bp, Artificial Sequence
  Description of Artificial Sequence: Synthetic gluten; inner sequence
cgaaccgctgtatgctcaacgtatggtggt

SEQ ID NO: 40957 - DNA, 30 bp, Artificial Sequence
  Description of Artificial Sequence: Synthetic gluten; inner sequence
ggcattcgatgcactacacgttgttgtgta

SEQ ID NO: 40958 - DNA, 30 bp, Artificial Sequence
  Description of Artificial Sequence: Synthetic gluten; inner sequence
tacgcaacgaccctatcgagaggacatgta

SEQ ID NO: 40959 - DNA, 30 bp, Artificial Sequence
  Description of Artificial Sequence: Synthetic gluten; inner sequence
gcttgagccgaagaccctacaatcagatga

SEQ ID NO: 40960 - DNA, 29 bp, Artificial Sequence
  Description of Artificial Sequence: Synthetic gluten; inner sequence
tggacggaagaaagctactactggcagca

SEQ ID NO: 40961 - DNA, 30 bp, Artificial Sequence
  Description of Artificial Sequence: Synthetic gluten; inner sequence
catgactacacttgctcccaaagaggcata

SEQ ID NO: 40962 - DNA, 28 bp, Artificial Sequence
  Description of Artificial Sequence: Synthetic gluten; inner sequence
gtacggaacgaacgtaatggacgacgta

SEQ ID NO: 40963 - DNA, 30 bp, Artificial Sequence; identical to SEQ ID NO: 789
  Description of Artificial Sequence: Synthetic gluten; inner sequence

SEQ ID NO: 40964 - DNA, 30 bp, Artificial Sequence
  Description of Artificial Sequence: Synthetic gluten; inner sequence
cgactcgacccgaaagtaggcatgtggcta

SEQ ID NO: 40965 - DNA, 30 bp, Artificial Sequence
  Description of Artificial Sequence: Synthetic gluten; inner sequence
ggccgacgaggctgaaagtcatacgtgcta

SEQ ID NO: 40966 - DNA, 30 bp, Artificial Sequence
  Description of Artificial Sequence: Synthetic gluten; inner sequence
gcgtcagcggcagagggactgatcaggtca

SEQ ID NO: 40967 - DNA, 30 bp, Artificial Sequence
  Description of Artificial Sequence: Synthetic gluten; inner sequence
atggcatgcgatgaccacgtactgggcaat

SEQ ID NO: 40968 - DNA, 28 bp, Artificial Sequence
  Description of Artificial Sequence: Synthetic gluten; inner sequence
ggacgcagctgacctagcatgtgtgtca

SEQ ID NO: 40969 - DNA, 30 bp, Artificial Sequence
  Description of Artificial Sequence: Synthetic gluten; inner sequence
cgagctcgccgagagccgaagacagtcaca

SEQ ID NO: 40970 - DNA, 30 bp, Artificial Sequence
  Description of Artificial Sequence: Synthetic gluten; inner sequence
ccgatcgacctacaaagagcctgtaatagc

SEQ ID NO: 40971 - DNA, 30 bp, Artificial Sequence
  Description of Artificial Sequence: Synthetic gluten; inner sequence
ccgatcgagcctaatagtagagcatgttac

SEQ ID NO: 40972 - DNA, 30 bp, Artificial Sequence; identical to SEQ ID NO: 493
  Description of Artificial Sequence: Synthetic gluten; inner sequence

SEQ ID NO: 40973 - DNA, 30 bp, Artificial Sequence
  Description of Artificial Sequence: Synthetic gluten; inner sequence
cctgagccgaagatcacctgtcaagttaga

SEQ ID NO: 40974 - DNA, 30 bp, Artificial Sequence
  Description of Artificial Sequence: Synthetic gluten; inner sequence
catcatgtggccgaacagactagctgggca

SEQ ID NO: 40975 - DNA, 30 bp, Artificial Sequence
  Description of Artificial Sequence: Synthetic gluten; inner sequence
ggccgaatctgaccgctatcatgggatggc

SEQ ID NO: 40976 - DNA, 30 bp, Artificial Sequence
  Description of Artificial Sequence: Synthetic gluten; inner sequence
caacacacgaaggctagctattgactcacg

SEQ ID NO: 40977 - DNA, 30 bp, Artificial Sequence
  Description of Artificial Sequence: Synthetic gluten; inner sequence
gtacgacgcggaccttcaagtaggcgtgca

SEQ ID NO: 40978 - DNA, 30 bp, Artificial Sequence; identical to SEQ ID NO: 20744
  Description of Artificial Sequence: Synthetic gluten; inner sequence

SEQ ID NO: 40979 - DNA, 30 bp, Artificial Sequence
  Description of Artificial Sequence: Synthetic gluten; inner sequence
ccactcacatggacgtatctgagctatcga

SEQ ID NO: 40980 - DNA, 30 bp, Artificial Sequence
  Description of Artificial Sequence: Synthetic gluten; inner sequence
ggtctgatcgaacctagagagtggcgtgga

SEQ ID NO: 40981 - DNA, 30 bp, Artificial Sequence; identical to SEQ ID NO: 991
  Description of Artificial Sequence: Synthetic gluten; inner sequence

SEQ ID NO: 40982 - DNA, 30 bp, Artificial Sequence
  Description of Artificial Sequence: Synthetic gluten; inner sequence
cacctctgacctgagcatgtgcgctgacga

SEQ ID NO: 40983 - DNA, 30 bp, Artificial Sequence
  Description of Artificial Sequence: Synthetic gluten; inner sequence
ggaacggagcggaactcattggatcttcga

SEQ ID NO: 40984 - DNA, 30 bp, Artificial Sequence
  Description of Artificial Sequence: Synthetic gluten; inner sequence
ggccgccctggatgtgagcatgcatctagt

SEQ ID NO: 40985 - DNA, 30 bp, Artificial Sequence
  Description of Artificial Sequence: Synthetic gluten; inner sequence
acttcgatgcacctgtctatgtcgactagt

SEQ ID NO: 40986 - DNA, 30 bp, Artificial Sequence; identical to SEQ ID NO: 44
  Description of Artificial Sequence: Synthetic gluten; inner sequence

SEQ ID NO: 40987 - DNA, 30 bp, Artificial Sequence
  Description of Artificial Sequence: Synthetic gluten; inner sequence
ccgagcgacactaagctcatgataggcatt

SEQ ID NO: 40988 - DNA, 30 bp, Artificial Sequence
  Description of Artificial Sequence: Synthetic gluten; inner sequence
cctgaacgcaccctaactaagaaacatgga

SEQ ID NO: 40989 - DNA, 30 bp, Artificial Sequence
  Description of Artificial Sequence: Synthetic gluten; inner sequence
ggtgctggcgaacgaccagacattgtgcta

SEQ ID NO: 40990 - DNA, 30 bp, Artificial Sequence
  Description of Artificial Sequence: Synthetic gluten; inner sequence
catgtacgcgatccccagcattaaggcata

SEQ ID NO: 40991 - DNA, 30 bp, Artificial Sequence
  Description of Artificial Sequence: Synthetic gluten; inner sequence
tggactgagcttcactaaaggtgggacgta

SEQ ID NO: 40992 - DNA, 30 bp, Artificial Sequence
  Description of Artificial Sequence: Synthetic gluten; inner sequence
tgtccgactcgaccatctggacaggcatac

SEQ ID NO: 40993 - DNA, 30 bp, Artificial Sequence
  Description of Artificial Sequence: Synthetic gluten; inner sequence
gacgaactcgaaccgaagcaaggccggtca

SEQ ID NO: 40994 - DNA, 30 bp, Artificial Sequence
  Description of Artificial Sequence: Synthetic gluten; inner sequence
tgcctgatcgaacctagagagtggcgtgga

SEQ ID NO: 40995 - DNA, 30 bp, Artificial Sequence
  Description of Artificial Sequence: Synthetic gluten; inner sequence
tcgtaccgatcataggccggctagttcata

SEQ ID NO: 40996 - DNA, 30 bp, Artificial Sequence
  Description of Artificial Sequence: Synthetic gluten; inner sequence
ccgacgagtccctacaagctgcgtgtcata

SEQ ID NO: 40997 - DNA, 30 bp, Artificial Sequence
  Description of Artificial Sequence: Synthetic gluten; inner sequence
ccgatagaccagctactaactagcagcaga

SEQ ID NO: 40998 - DNA, 30 bp, Artificial Sequence
  Description of Artificial Sequence: Synthetic gluten; inner sequence
cgcgcgaggttcctaacatcattcgcgagt

SEQ ID NO: 40999 - DNA, 30 bp, Artificial Sequence
  Description of Artificial Sequence: Synthetic gluten; inner sequence
ggcattcgatgaccgaccgtacgagagtca

SEQ ID NO: 41000 - DNA, 30 bp, Artificial Sequence; identical to SEQ ID NO: 36966
  Description of Artificial Sequence: Synthetic gluten; inner sequence

SEQ ID NO: 41001 - DNA, 30 bp, Artificial Sequence
  Description of Artificial Sequence: Synthetic gluten; inner sequence
gtccgacatgcccctcaatgtggacgtgga

SEQ ID NO: 41002 - DNA, 30 bp, Artificial Sequence
  Description of Artificial Sequence: Synthetic gluten; inner sequence
catgactcaccgggaacggccagtttcata

SEQ ID NO: 41003 - DNA, 53 bp, Artificial Sequence; identical to SEQ ID NO: 1024
  Description of Artificial Sequence: Synthetic gluten; 5' sequence and inner sequence

SEQ ID NO: 41004 - DNA, 53 bp, Artificial Sequence; identical to SEQ ID NO: 1034
  Description of Artificial Sequence: Synthetic gluten; 5' sequence and inner sequence

SEQ ID NO: 41005 - DNA, 53 bp, Artificial Sequence; identical to SEQ ID NO: 1040
  Description of Artificial Sequence: Synthetic gluten; 5' sequence and inner sequence

SEQ ID NO: 41006 - DNA, 53 bp, Artificial Sequence; identical to SEQ ID NO: 1017
  Description of Artificial Sequence: Synthetic gluten; 5' sequence and inner sequence

SEQ ID NO: 41007 - DNA, 53 bp, Artificial Sequence; identical to SEQ ID NO: 1464
  Description of Artificial Sequence: Synthetic gluten; 5' sequence and inner sequence

SEQ ID NO: 41008 - DNA, 53 bp, Artificial Sequence; identical to SEQ ID NO: 1039
  Description of Artificial Sequence: Synthetic gluten; 5' sequence and inner sequence

SEQ ID NO: 41009 - DNA, 53 bp, Artificial Sequence; identical to SEQ ID NO: 1008
  Description of Artificial Sequence: Synthetic gluten; 5' sequence and inner sequence

SEQ ID NO: 41010 - DNA, 53 bp, Artificial Sequence; identical to SEQ ID NO: 1006
  Description of Artificial Sequence: Synthetic gluten; 5' sequence and inner sequence

SEQ ID NO: 41011 - DNA, 53 bp, Artificial Sequence; identical to SEQ ID NO: 1631
  Description of Artificial Sequence: Synthetic gluten; 5' sequence and inner sequence

SEQ ID NO: 41012 - DNA, 53 bp, Artificial Sequence; identical to SEQ ID NO: 1019
  Description of Artificial Sequence: Synthetic gluten; 5' sequence and inner sequence

SEQ ID NO: 41013 - DNA, 53 bp, Artificial Sequence; identical to SEQ ID NO: 1010
  Description of Artificial Sequence: Synthetic gluten; 5' sequence and inner sequence

SEQ ID NO: 41014 - DNA, 53 bp, Artificial Sequence; identical to SEQ ID NO: 1052
  Description of Artificial Sequence: Synthetic gluten; 5' sequence and inner sequence

SEQ ID NO: 41015 - DNA, 53 bp, Artificial Sequence; identical to SEQ ID NO: 1074
  Description of Artificial Sequence: Synthetic gluten; 5' sequence and inner sequence

SEQ ID NO: 41016 - DNA, 53 bp, Artificial Sequence; identical to SEQ ID NO: 1094
  Description of Artificial Sequence: Synthetic gluten; 5' sequence and inner sequence

SEQ ID NO: 41017 - DNA, 53 bp, Artificial Sequence; identical to SEQ ID NO: 1139
  Description of Artificial Sequence: Synthetic gluten; 5' sequence and inner sequence

SEQ ID NO: 41018 - DNA, 53 bp, Artificial Sequence; identical to SEQ ID NO: 1060
  Description of Artificial Sequence: Synthetic gluten; 5' sequence and inner sequence

SEQ ID NO: 41019 - DNA, 53 bp, Artificial Sequence; identical to SEQ ID NO: 1116
  Description of Artificial Sequence: Synthetic gluten; 5' sequence and inner sequence

SEQ ID NO: 41020 - DNA, 53 bp, Artificial Sequence; identical to SEQ ID NO: 1273
  Description of Artificial Sequence: Synthetic gluten; 5' sequence and inner sequence

SEQ ID NO: 41021 - DNA, 53 bp, Artificial Sequence; identical to SEQ ID NO: 1022
  Description of Artificial Sequence: Synthetic gluten; 5' sequence and inner sequence

SEQ ID NO: 41022 - DNA, 53 bp, Artificial Sequence; identical to SEQ ID NO: 1012
  Description of Artificial Sequence: Synthetic gluten; 5' sequence and inner sequence

SEQ ID NO: 41023 - DNA, 53 bp, Artificial Sequence; identical to SEQ ID NO: 1027
  Description of Artificial Sequence: Synthetic gluten; 5' sequence and inner sequence

SEQ ID NO: 41024 - DNA, 53 bp, Artificial Sequence; identical to SEQ ID NO: 1053
  Description of Artificial Sequence: Synthetic gluten; 5' sequence and inner sequence

SEQ ID NO: 41025 - DNA, 53 bp, Artificial Sequence; identical to SEQ ID NO: 1047
  Description of Artificial Sequence: Synthetic gluten; 5' sequence and inner sequence

SEQ ID NO: 41026 - DNA, 53 bp, Artificial Sequence; identical to SEQ ID NO: 1037
  Description of Artificial Sequence: Synthetic gluten; 5' sequence and inner sequence

SEQ ID NO: 41027 - DNA, 53 bp, Artificial Sequence
  Description of Artificial Sequence: Synthetic gluten; 5' sequence and inner sequence
tagggaagagaaggacatatgatcatgtgcgaaccgagcttgtacaaggcata

SEQ ID NO: 41028 - DNA, 53 bp, Artificial Sequence; identical to SEQ ID NO: 1059
  Description of Artificial Sequence: Synthetic gluten; 5' sequence and inner sequence

SEQ ID NO: 41029 - DNA, 53 bp, Artificial Sequence; identical to SEQ ID NO: 1032
  Description of Artificial Sequence: Synthetic gluten; 5' sequence and inner sequence

SEQ ID NO: 41030 - DNA, 53 bp, Artificial Sequence; identical to SEQ ID NO: 1058
  Description of Artificial Sequence: Synthetic gluten; 5' sequence and inner sequence

SEQ ID NO: 41031 - DNA, 53 bp, Artificial Sequence; identical to SEQ ID NO: 5874
  Description of Artificial Sequence: Synthetic gluten; 5' sequence and inner sequence

SEQ ID NO: 41032 - DNA, 53 bp, Artificial Sequence; identical to SEQ ID NO: 1308
  Description of Artificial Sequence: Synthetic gluten; 5' sequence and inner sequence

SEQ ID NO: 41033 - DNA, 53 bp, Artificial Sequence; identical to SEQ ID NO: 1383
  Description of Artificial Sequence: Synthetic gluten; 5' sequence and inner sequence

SEQ ID NO: 41034 - DNA, 53 bp, Artificial Sequence; identical to SEQ ID NO: 1377
  Description of Artificial Sequence: Synthetic gluten; 5' sequence and inner sequence

SEQ ID NO: 41035 - DNA, 53 bp, Artificial Sequence; identical to SEQ ID NO: 1082
  Description of Artificial Sequence: Synthetic gluten; 5' sequence and inner sequence

SEQ ID NO: 41036 - DNA, 53 bp, Artificial Sequence; identical to SEQ ID NO: 1238
  Description of Artificial Sequence: Synthetic gluten; 5' sequence and inner sequence

SEQ ID NO: 41037 - DNA, 53 bp, Artificial Sequence; identical to SEQ ID NO: 1055
  Description of Artificial Sequence: Synthetic gluten; 5' sequence and inner sequence

SEQ ID NO: 41038 - DNA, 52 bp, Artificial Sequence; identical to SEQ ID NO: 1193
  Description of Artificial Sequence: Synthetic gluten; 5' sequence and inner sequence

SEQ ID NO: 41039 - DNA, 53 bp, Artificial Sequence; identical to SEQ ID NO: 1003
  Description of Artificial Sequence: Synthetic gluten; 5' sequence and inner sequence

SEQ ID NO: 41040 - DNA, 53 bp, Artificial Sequence; identical to SEQ ID NO: 1128
  Description of Artificial Sequence: Synthetic gluten; 5' sequence and inner sequence

SEQ ID NO: 41041 - DNA, 53 bp, Artificial Sequence; identical to SEQ ID NO: 5513
  Description of Artificial Sequence: Synthetic gluten; 5' sequence and inner sequence

SEQ ID NO: 41042 - DNA, 53 bp, Artificial Sequence; identical to SEQ ID NO: 5814
  Description of Artificial Sequence: Synthetic gluten; 5' sequence and inner sequence

SEQ ID NO: 41043 - DNA, 53 bp, Artificial Sequence; identical to SEQ ID NO: 1023
  Description of Artificial Sequence: Synthetic gluten; 5' sequence and inner sequence

SEQ ID NO: 41044 - DNA, 50 bp, Artificial Sequence; identical to SEQ ID NO: 25993
  Description of Artificial Sequence: Synthetic gluten; 5' sequence and inner sequence

SEQ ID NO: 41045 - DNA, 53 bp, Artificial Sequence; identical to SEQ ID NO: 1645
  Description of Artificial Sequence: Synthetic gluten; 5' sequence and inner sequence

SEQ ID NO: 41046 - DNA, 53 bp, Artificial Sequence; identical to SEQ ID NO: 1005
  Description of Artificial Sequence: Synthetic gluten; 5' sequence and inner sequence

SEQ ID NO: 41047 - DNA, 53 bp, Artificial Sequence; identical to SEQ ID NO: 1438
  Description of Artificial Sequence: Synthetic gluten; 5' sequence and inner sequence

SEQ ID NO: 41048 - DNA, 48 bp, Artificial Sequence; identical to SEQ ID NO: 1427
  Description of Artificial Sequence: Synthetic gluten; 5' sequence and inner sequence

SEQ ID NO: 41049 - DNA, 53 bp, Artificial Sequence; identical to SEQ ID NO: 29427
  Description of Artificial Sequence: Synthetic gluten; 5' sequence and inner sequence

SEQ ID NO: 41050 - DNA, 53 bp, Artificial Sequence; identical to SEQ ID NO: 1015
  Description of Artificial Sequence: Synthetic gluten; 5' sequence and inner sequence

SEQ ID NO: 41051 - DNA, 53 bp, Artificial Sequence; identical to SEQ ID NO: 1029
  Description of Artificial Sequence: Synthetic gluten; 5' sequence and inner sequence

SEQ ID NO: 41052 - DNA, 53 bp, Artificial Sequence
  Description of Artificial Sequence: Synthetic gluten; 5' sequence and inner sequence
tagggaagagaaggacatatgatgtcatgcgatggaagagaatgtgcattgtc

SEQ ID NO: 41053 - DNA, 53 bp, Artificial Sequence; identical to SEQ ID NO: 1777
  Description of Artificial Sequence: Synthetic gluten; 5' sequence and inner sequence

SEQ ID NO: 41054 - DNA, 53 bp, Artificial Sequence; identical to SEQ ID NO: 1142
  Description of Artificial Sequence: Synthetic gluten; 5' sequence and inner sequence

SEQ ID NO: 41055 - DNA, 53 bp, Artificial Sequence
  Description of Artificial Sequence: Synthetic gluten; 5' sequence and inner sequence
tagggaagagaaggacatatgatgtcatgcgatctcactatcaagtgttggca

SEQ ID NO: 41056 - DNA, 53 bp, Artificial Sequence; identical to SEQ ID NO: 1147
  Description of Artificial Sequence: Synthetic gluten; 5' sequence and inner sequence

SEQ ID NO: 41057 - DNA, 53 bp, Artificial Sequence; identical to SEQ ID NO: 1218
  Description of Artificial Sequence: Synthetic gluten; 5' sequence and inner sequence

SEQ ID NO: 41058 - DNA, 53 bp, Artificial Sequence; identical to SEQ ID NO: 1328
  Description of Artificial Sequence: Synthetic gluten; 5' sequence and inner sequence

SEQ ID NO: 41059 - DNA, 53 bp, Artificial Sequence; identical to SEQ ID NO: 1133
  Description of Artificial Sequence: Synthetic gluten; 5' sequence and inner sequence

SEQ ID NO: 41060 - DNA, 53 bp, Artificial Sequence
  Description of Artificial Sequence: Synthetic gluten; 5' sequence and inner sequence
tagggaagagaaggacatatgatggactgcgatggatggggcaatacgacgtt

SEQ ID NO: 41061 - DNA, 53 bp, Artificial Sequence; identical to SEQ ID NO: 1009
  Description of Artificial Sequence: Synthetic gluten; 5' sequence and inner sequence

SEQ ID NO: 41062 - DNA, 53 bp, Artificial Sequence; identical to SEQ ID NO: 5860
  Description of Artificial Sequence: Synthetic gluten; 5' sequence and inner sequence

SEQ ID NO: 41063 - DNA, 52 bp, Artificial Sequence; identical to SEQ ID NO: 1070
  Description of Artificial Sequence: Synthetic gluten; 5' sequence and inner sequence

SEQ ID NO: 41064 - DNA, 53 bp, Artificial Sequence; identical to SEQ ID NO: 1968
  Description of Artificial Sequence: Synthetic gluten; 5' sequence and inner sequence

SEQ ID NO: 41065 - DNA, 53 bp, Artificial Sequence
  Description of Artificial Sequence: Synthetic gluten; 5' sequence and inner sequence
tagggaagagaaggacatatgatgacgtcgatgaaccttcgagtgagcatgta

SEQ ID NO: 41066 - DNA, 53 bp, Artificial Sequence; identical to SEQ ID NO: 1011
  Description of Artificial Sequence: Synthetic gluten; 5' sequence and inner sequence

SEQ ID NO: 41067 - DNA, 53 bp, Artificial Sequence
  Description of Artificial Sequence: Synthetic gluten; 5' sequence and inner sequence
tagggaagagaaggacatatgatccgacgaagataaggcagagaggcatccta

SEQ ID NO: 41068 - DNA, 53 bp, Artificial Sequence; identical to SEQ ID NO: 13799
  Description of Artificial Sequence: Synthetic gluten; 5' sequence and inner sequence

SEQ ID NO: 41069 - DNA, 53 bp, Artificial Sequence; identical to SEQ ID NO: 1950
  Description of Artificial Sequence: Synthetic gluten; 5' sequence and inner sequence

SEQ ID NO: 41070 - DNA, 53 bp, Artificial Sequence; identical to SEQ ID NO: 1013
  Description of Artificial Sequence: Synthetic gluten; 5' sequence and inner sequence

SEQ ID NO: 41071 - DNA, 53 bp, Artificial Sequence; identical to SEQ ID NO: 1080
  Description of Artificial Sequence: Synthetic gluten; 5' sequence and inner sequence

SEQ ID NO: 41072 - DNA, 53 bp, Artificial Sequence; identical to SEQ ID NO: 29947
  Description of Artificial Sequence: Synthetic gluten; 5' sequence and inner sequence

SEQ ID NO: 41073 - DNA, 53 bp, Artificial Sequence
  Description of Artificial Sequence: Synthetic gluten; 5' sequence and inner sequence
tagggaagagaaggacatatgatggacaatgcgaaccgttcaagtcgaatgga

SEQ ID NO: 41074 - DNA, 53 bp, Artificial Sequence; identical to SEQ ID NO: 1715
  Description of Artificial Sequence: Synthetic gluten; 5' sequence and inner sequence

SEQ ID NO: 41075 - DNA, 53 bp, Artificial Sequence; identical to SEQ ID NO: 1066
  Description of Artificial Sequence: Synthetic gluten; 5' sequence and inner sequence

SEQ ID NO: 41076 - DNA, 53 bp, Artificial Sequence; identical to SEQ ID NO: 1253
  Description of Artificial Sequence: Synthetic gluten; 5' sequence and inner sequence

SEQ ID NO: 41077 - DNA, 53 bp, Artificial Sequence; identical to SEQ ID NO: 29989
  Description of Artificial Sequence: Synthetic gluten; 5' sequence and inner sequence

SEQ ID NO: 41078 - DNA, 53 bp, Artificial Sequence; identical to SEQ ID NO: 9988
  Description of Artificial Sequence: Synthetic gluten; 5' sequence and inner sequence

SEQ ID NO: 41079 - DNA, 53 bp, Artificial Sequence; identical to SEQ ID NO: 1741
  Description of Artificial Sequence: Synthetic gluten; 5' sequence and inner sequence

SEQ ID NO: 41080 - DNA, 53 bp, Artificial Sequence; identical to SEQ ID NO: 1028
  Description of Artificial Sequence: Synthetic gluten; 5' sequence and inner sequence

SEQ ID NO: 41081 - DNA, 53 bp, Artificial Sequence
  Description of Artificial Sequence: Synthetic gluten; 5' sequence and inner sequence
tagggaagagaaggacatatgatacattggacggaacgacccttcaagcgggc

SEQ ID NO: 41082 - DNA, 53 bp, Artificial Sequence
  Description of Artificial Sequence: Synthetic gluten; 5' sequence and inner sequence
tagggaagagaaggacatatgataggcacgagctccagaaccttcagtcagca

SEQ ID NO: 41083 - DNA, 53 bp, Artificial Sequence; identical to SEQ ID NO: 1191
  Description of Artificial Sequence: Synthetic gluten; 5' sequence and inner sequence

SEQ ID NO: 41084 - DNA, 53 bp, Artificial Sequence; identical to SEQ ID NO: 1016
  Description of Artificial Sequence: Synthetic gluten; 5' sequence and inner sequence

SEQ ID NO: 41085 - DNA, 53 bp, Artificial Sequence; identical to SEQ ID NO: 9991
  Description of Artificial Sequence: Synthetic gluten; 5' sequence and inner sequence

SEQ ID NO: 41086 - DNA, 53 bp, Artificial Sequence
  Description of Artificial Sequence: Synthetic gluten; 5' sequence and inner sequence
tagggaagagaaggacatatgatggccgtcgatgagcgcgcatgtatcgtgtc

SEQ ID NO: 41087 - DNA, 53 bp, Artificial Sequence
  Description of Artificial Sequence: Synthetic gluten; 5' sequence and inner sequence
tagggaagagaaggacatatgatggcatgctcgaccctcatgtgggacaggta

SEQ ID NO: 41088 - DNA, 53 bp, Artificial Sequence; identical to SEQ ID NO: 5981
  Description of Artificial Sequence: Synthetic gluten; 5' sequence and inner sequence

SEQ ID NO: 41089 - DNA, 53 bp, Artificial Sequence; identical to SEQ ID NO: 1041
  Description of Artificial Sequence: Synthetic gluten; 5' sequence and inner sequence

SEQ ID NO: 41090 - DNA, 53 bp, Artificial Sequence
  Description of Artificial Sequence: Synthetic gluten; 5' sequence and inner sequence
tagggaagagaaggacatatgatcatgtgcaacgtatagccgaaatgggcata

SEQ ID NO: 41091 - DNA, 53 bp, Artificial Sequence; identical to SEQ ID NO: 1316
  Description of Artificial Sequence: Synthetic gluten; 5' sequence and inner sequence

SEQ ID NO: 41092 - DNA, 53 bp, Artificial Sequence; identical to SEQ ID NO: 1692
  Description of Artificial Sequence: Synthetic gluten; 5' sequence and inner sequence

SEQ ID NO: 41093 - DNA, 53 bp, Artificial Sequence; identical to SEQ ID NO: 5644
  Description of Artificial Sequence: Synthetic gluten; 5' sequence and inner sequence

SEQ ID NO: 41094 - DNA, 53 bp, Artificial Sequence
  Description of Artificial Sequence: Synthetic gluten; 5' sequence and inner sequence
tagggaagagaaggacatatgatcatatggacagcgctacactcaagtcgtca

SEQ ID NO: 41095 - DNA, 53 bp, Artificial Sequence; identical to SEQ ID NO: 1816
  Description of Artificial Sequence: Synthetic gluten; 5' sequence and inner sequence

SEQ ID NO: 41096 - DNA, 53 bp, Artificial Sequence
  Description of Artificial Sequence: Synthetic gluten; 5' sequence and inner sequence
tagggaagagaaggacatatgatggacaaacgcacctatcaagtgagatggca

SEQ ID NO: 41097 - DNA, 53 bp, Artificial Sequence; identical to SEQ ID NO: 1702
  Description of Artificial Sequence: Synthetic gluten; 5' sequence and inner sequence

SEQ ID NO: 41098 - DNA, 53 bp, Artificial Sequence; identical to SEQ ID NO: 1889
  Description of Artificial Sequence: Synthetic gluten; 5' sequence and inner sequence

SEQ ID NO: 41099 - DNA, 53 bp, Artificial Sequence
  Description of Artificial Sequence: Synthetic gluten; 5' sequence and inner sequence
tagggaagagaaggacatatgatgtactgcacgaccgatagagcatggactgt

SEQ ID NO: 41100 - DNA, 53 bp, Artificial Sequence
  Description of Artificial Sequence: Synthetic gluten; 5' sequence and inner sequence
tagggaagagaaggacatatgatgtaccaacgcacccttcaagatgtcatgga

SEQ ID NO: 41101 - DNA, 53 bp, Artificial Sequence
  Description of Artificial Sequence: Synthetic gluten; 5' sequence and inner sequence
tagggaagagaaggacatatgatggacagcgatggatgtggaaatgcgacgtc

SEQ ID NO: 41102 - DNA, 53 bp, Artificial Sequence
  Description of Artificial Sequence: Synthetic gluten; 5' sequence and inner sequence
tagggaagagaaggacatatgatggcatgcgattccctgtcaacgcttgatca

SEQ ID NO: 41103 - DNA, 53 bp, Artificial Sequence
  Description of Artificial Sequence: Synthetic gluten; 5' sequence and inner sequence
tagggaagagaaggacatatgatggcctgatcgaacctagagagaggcgtgga

SEQ ID NO: 41104 - DNA, 53 bp, Artificial Sequence; identical to SEQ ID NO: 5234
  Description of Artificial Sequence: Synthetic gluten; 5' sequence and inner sequence

SEQ ID NO: 41105 - DNA, 53 bp, Artificial Sequence
  Description of Artificial Sequence: Synthetic gluten; 5' sequence and inner sequence
tagggaagagaaggacatatgatccatcatggcatgatattcactggcgtgtc

SEQ ID NO: 41106 - DNA, 53 bp, Artificial Sequence; identical to SEQ ID NO: 1045
  Description of Artificial Sequence: Synthetic gluten; 5' sequence and inner sequence

SEQ ID NO: 41107 - DNA, 53 bp, Artificial Sequence; identical to SEQ ID NO: 29662
  Description of Artificial Sequence: Synthetic gluten; 5' sequence and inner sequence

SEQ ID NO: 41108 - DNA, 53 bp, Artificial Sequence; identical to SEQ ID NO: 1265
  Description of Artificial Sequence: Synthetic gluten; 5' sequence and inner sequence

SEQ ID NO: 41109 - DNA, 53 bp, Artificial Sequence; identical to SEQ ID NO: 1203
  Description of Artificial Sequence: Synthetic gluten; 5' sequence and inner sequence

SEQ ID NO: 41110 - DNA, 53 bp, Artificial Sequence; identical to SEQ ID NO: 1764
  Description of Artificial Sequence: Synthetic gluten; 5' sequence and inner sequence

SEQ ID NO: 41111 - DNA, 53 bp, Artificial Sequence
  Description of Artificial Sequence: Synthetic gluten; 5' sequence and inner sequence
tagggaagagaaggacatatgatcgatcacgagaagatgaactgcgatggatg

SEQ ID NO: 41112 - DNA, 53 bp, Artificial Sequence; identical to SEQ ID NO: 1007
  Description of Artificial Sequence: Synthetic gluten; 5' sequence and inner sequence

SEQ ID NO: 41113 - DNA, 53 bp, Artificial Sequence
  Description of Artificial Sequence: Synthetic gluten; 5' sequence and inner sequence
tagggaagagaaggacatatgatgacgacgcgaacctatcaagggctcatgga

SEQ ID NO: 41114 - DNA, 53 bp, Artificial Sequence; identical to SEQ ID NO: 1099
  Description of Artificial Sequence: Synthetic gluten; 5' sequence and inner sequence

SEQ ID NO: 41115 - DNA, 53 bp, Artificial Sequence
  Description of Artificial Sequence: Synthetic gluten; 5' sequence and inner sequence
tagggaagagaaggacatatgatgtcatgcgttgacctaccagtggccaggta

SEQ ID NO: 41116 - DNA, 53 bp, Artificial Sequence
  Description of Artificial Sequence: Synthetic gluten; 5' sequence and inner sequence
tagggaagagaaggacatatgattggccgacctattgcctaacaagtgtggca

SEQ ID NO: 41117 - DNA, 53 bp, Artificial Sequence
  Description of Artificial Sequence: Synthetic gluten; 5' sequence and inner sequence
tagggaagagaaggacatatgattggccgacgagtcactatcaagttcgggca

SEQ ID NO: 41118 - DNA, 53 bp, Artificial Sequence
  Description of Artificial Sequence: Synthetic gluten; 5' sequence and inner sequence
tagggaagagaaggacatatgatatgcacttcgatggatggtcagccacgacg

SEQ ID NO: 41119 - DNA, 53 bp, Artificial Sequence; identical to SEQ ID NO: 5535
  Description of Artificial Sequence: Synthetic gluten; 5' sequence and inner sequence

SEQ ID NO: 41120 - DNA, 53 bp, Artificial Sequence
  Description of Artificial Sequence: Synthetic gluten; 5' sequence and inner sequence
tagggaagagaaggacatatgatggcctgatcgaacctagagagcggcgtgga

SEQ ID NO: 41121 - DNA, 53 bp, Artificial Sequence
  Description of Artificial Sequence: Synthetic gluten; 5' sequence and inner sequence
tagggaagagaaggacatatgatacatgtcacgaacgaacctacatgtggaca

SEQ ID NO: 41122 - DNA, 53 bp, Artificial Sequence
  Description of Artificial Sequence: Synthetic gluten; 5' sequence and inner sequence
tagggaagagaaggacatatgatcatgtacacagtgcagcaccatgtggcata

SEQ ID NO: 41123 - DNA, 53 bp, Artificial Sequence; identical to SEQ ID NO: 1122
  Description of Artificial Sequence: Synthetic gluten; 5' sequence and inner sequence

SEQ ID NO: 41124 - DNA, 53 bp, Artificial Sequence; identical to SEQ ID NO: 1145
  Description of Artificial Sequence: Synthetic gluten; 5' sequence and inner sequence

SEQ ID NO: 41125 - DNA, 53 bp, Artificial Sequence; identical to SEQ ID NO: 1911
  Description of Artificial Sequence: Synthetic gluten; 5' sequence and inner sequence

SEQ ID NO: 41126 - DNA, 53 bp, Artificial Sequence; identical to SEQ ID NO: 1049
  Description of Artificial Sequence: Synthetic gluten; 5' sequence and inner sequence

SEQ ID NO: 41127 - DNA, 53 bp, Artificial Sequence; identical to SEQ ID NO: 5889
  Description of Artificial Sequence: Synthetic gluten; 5' sequence and inner sequence

SEQ ID NO: 41128 - DNA, 53 bp, Artificial Sequence; identical to SEQ ID NO: 1311
  Description of Artificial Sequence: Synthetic gluten; 5' sequence and inner sequence

SEQ ID NO: 41129 - DNA, 53 bp, Artificial Sequence
  Description of Artificial Sequence: Synthetic gluten; 5' sequence and inner sequence
tagggaagagaaggacatatgatggacagagcgaacccttcaagtgtgctgta

SEQ ID NO: 41130 - DNA, 53 bp, Artificial Sequence
  Description of Artificial Sequence: Synthetic gluten; 5' sequence and inner sequence
tagggaagagaaggacatatgatgaccgaacggaacttcatgtgcgatatgta

SEQ ID NO: 41131 - DNA, 53 bp, Artificial Sequence
  Description of Artificial Sequence: Synthetic gluten; 5' sequence and inner sequence
tagggaagagaaggacatatgatggacaaacgcagcctacatgtggaagtgta

SEQ ID NO: 41132 - DNA, 53 bp, Artificial Sequence
  Description of Artificial Sequence: Synthetic gluten; 5' sequence and inner sequence
tagggaagagaaggacatatgatgtcatgcgatggattgggcattgcgtaggc

SEQ ID NO: 41133 - DNA, 53 bp, Artificial Sequence
  Description of Artificial Sequence: Synthetic gluten; 5' sequence and inner sequence
tagggaagagaaggacatatgatcatgtacacatggacagcgtgaacgtcata

SEQ ID NO: 41134 - DNA, 53 bp, Artificial Sequence; identical to SEQ ID NO: 1264
  Description of Artificial Sequence: Synthetic gluten; 5' sequence and inner sequence

SEQ ID NO: 41135 - DNA, 53 bp, Artificial Sequence; identical to SEQ ID NO: 5254
  Description of Artificial Sequence: Synthetic gluten; 5' sequence and inner sequence

SEQ ID NO: 41136 - DNA, 53 bp, Artificial Sequence; identical to SEQ ID NO: 1031
  Description of Artificial Sequence: Synthetic gluten; 5' sequence and inner sequence

SEQ ID NO: 41137 - DNA, 53 bp, Artificial Sequence
  Description of Artificial Sequence: Synthetic gluten; 5' sequence and inner sequence
tagggaagagaaggacatatgatgacattcacgaacctacaactggacgtgta

SEQ ID NO: 41138 - DNA, 53 bp, Artificial Sequence
  Description of Artificial Sequence: Synthetic gluten; 5' sequence and inner sequence
tagggaagagaaggacatatgatcatgtgcggaaaggcgtcgaagaaggcata

SEQ ID NO: 41139 - DNA, 53 bp, Artificial Sequence
  Description of Artificial Sequence: Synthetic gluten; 5' sequence and inner sequence
tagggaagagaaggacatatgatcatgtgcgaactagtatcgtttagagcata

SEQ ID NO: 41140 - DNA, 53 bp, Artificial Sequence
  Description of Artificial Sequence: Synthetic gluten; 5' sequence and inner sequence
tagggaagagaaggacatatgatgacgtgaacgacctcaagggacatgcacta

SEQ ID NO: 41141 - DNA, 53 bp, Artificial Sequence
  Description of Artificial Sequence: Synthetic gluten; 5' sequence and inner sequence
tagggaagagaaggacatatgataatatggccgagacaagctacgagctagtt

SEQ ID NO: 41142 - DNA, 53 bp, Artificial Sequence
  Description of Artificial Sequence: Synthetic gluten; 5' sequence and inner sequence
tagggaagagaaggacatatgatcatgacgacaccgagcgtatacacgacata

SEQ ID NO: 41143 - DNA, 53 bp, Artificial Sequence; identical to SEQ ID NO: 1703
  Description of Artificial Sequence: Synthetic gluten; 5' sequence and inner sequence

SEQ ID NO: 41144 - DNA, 53 bp, Artificial Sequence
  Description of Artificial Sequence: Synthetic gluten; 5' sequence and inner sequence
tagggaagagaaggacatatgatggccgacgatggaagtgagcttgcctagtc

SEQ ID NO: 41145 - DNA, 53 bp, Artificial Sequence
  Description of Artificial Sequence: Synthetic gluten; 5' sequence and inner sequence
tagggaagagaaggacatatgatacgtcacgggaaacttgccggcattgtagc

SEQ ID NO: 41146 - DNA, 53 bp, Artificial Sequence
  Description of Artificial Sequence: Synthetic gluten; 5' sequence and inner sequence
tagggaagagaaggacatatgattcatcacatgaacgcgttctgagctggtca

SEQ ID NO: 41147 - DNA, 53 bp, Artificial Sequence
  Description of Artificial Sequence: Synthetic gluten; 5' sequence and inner sequence
tagggaagagaaggacatatgatgtaccgaacgtagcctaaagtgatcgtgga

SEQ ID NO: 41148 - DNA, 53 bp, Artificial Sequence; identical to SEQ ID NO: 1230
  Description of Artificial Sequence: Synthetic gluten; 5' sequence and inner sequence

SEQ ID NO: 41149 - DNA, 53 bp, Artificial Sequence; identical to SEQ ID NO: 1215
  Description of Artificial Sequence: Synthetic gluten; 5' sequence and inner sequence

SEQ ID NO: 41150 - DNA, 53 bp, Artificial Sequence
  Description of Artificial Sequence: Synthetic gluten; 5' sequence and inner sequence
tagggaagagaaggacatatgattggaacgcagaaaggtggatcggtcaacaa

SEQ ID NO: 41151 - DNA, 53 bp, Artificial Sequence; identical to SEQ ID NO: 1207
  Description of Artificial Sequence: Synthetic gluten; 5' sequence and inner sequence

SEQ ID NO: 41152 - DNA, 53 bp, Artificial Sequence
  Description of Artificial Sequence: Synthetic gluten; 5' sequence and inner sequence
tagggaagagaaggacatatgatggcatgcgatgagctcaagttggccttgta

SEQ ID NO: 41153 - DNA, 53 bp, Artificial Sequence; identical to SEQ ID NO: 1014
  Description of Artificial Sequence: Synthetic gluten; 5' sequence and inner sequence

SEQ ID NO: 41154 - DNA, 53 bp, Artificial Sequence; identical to SEQ ID NO: 1025
  Description of Artificial Sequence: Synthetic gluten; 5' sequence and inner sequence

SEQ ID NO: 41155 - DNA, 53 bp, Artificial Sequence
  Description of Artificial Sequence: Synthetic gluten; 5' sequence and inner sequence
tagggaagagaaggacatatgatccgacgatgaccgtgagactcaagcggaca

SEQ ID NO: 41156 - DNA, 53 bp, Artificial Sequence; identical to SEQ ID NO: 5775
  Description of Artificial Sequence: Synthetic gluten; 5' sequence and inner sequence

SEQ ID NO: 41157 - DNA, 53 bp, Artificial Sequence; identical to SEQ ID NO: 1714
  Description of Artificial Sequence: Synthetic gluten; 5' sequence and inner sequence

SEQ ID NO: 41158 - DNA, 53 bp, Artificial Sequence; identical to SEQ ID NO: 1906
  Description of Artificial Sequence: Synthetic gluten; 5' sequence and inner sequence

SEQ ID NO: 41159 - DNA, 53 bp, Artificial Sequence
  Description of Artificial Sequence: Synthetic gluten; 5' sequence and inner sequence
tagggaagagaaggacatatgataacatggccgacgacaccgatcatgtggga

SEQ ID NO: 41160 - DNA, 53 bp, Artificial Sequence; identical to SEQ ID NO: 1093
  Description of Artificial Sequence: Synthetic gluten; 5' sequence and inner sequence

SEQ ID NO: 41161 - DNA, 53 bp, Artificial Sequence; identical to SEQ ID NO: 1299
  Description of Artificial Sequence: Synthetic gluten; 5' sequence and inner sequence

SEQ ID NO: 41162 - DNA, 53 bp, Artificial Sequence; identical to SEQ ID NO: 1033
  Description of Artificial Sequence: Synthetic gluten; 5' sequence and inner sequence

SEQ ID NO: 41163 - DNA, 53 bp, Artificial Sequence
  Description of Artificial Sequence: Synthetic gluten; 5' sequence and inner sequence
tagggaagagaaggacatatgatcgaacgcaccgtaagaactggacagtcaca

SEQ ID NO: 41164 - DNA, 53 bp, Artificial Sequence
  Description of Artificial Sequence: Synthetic gluten; 5' sequence and inner sequence
tagggaagagaaggacatatgatcatgtacgcataaaggtgcagtcactcata

SEQ ID NO: 41165 - DNA, 53 bp, Artificial Sequence; identical to SEQ ID NO: 37702
  Description of Artificial Sequence: Synthetic gluten; 5' sequence and inner sequence

SEQ ID NO: 41166 - DNA, 53 bp, Artificial Sequence; identical to SEQ ID NO: 37967
  Description of Artificial Sequence: Synthetic gluten; 5' sequence and inner sequence

SEQ ID NO: 41167 - DNA, 53 bp, Artificial Sequence; identical to SEQ ID NO: 9401
  Description of Artificial Sequence: Synthetic gluten; 5' sequence and inner sequence

SEQ ID NO: 41168 - DNA, 53 bp, Artificial Sequence; identical to SEQ ID NO: 1243
  Description of Artificial Sequence: Synthetic gluten; 5' sequence and inner sequence

SEQ ID NO: 41169 - DNA, 53 bp, Artificial Sequence; identical to SEQ ID NO: 1134
  Description of Artificial Sequence: Synthetic gluten; 5' sequence and inner sequence

SEQ ID NO: 41170 - DNA, 53 bp, Artificial Sequence
  Description of Artificial Sequence: Synthetic gluten; 5' sequence and inner sequence
tagggaagagaaggacatatgatccatcagatgcaaaacgacaattgggcatt

SEQ ID NO: 41171 - DNA, 53 bp, Artificial Sequence; identical to SEQ ID NO: 5451
  Description of Artificial Sequence: Synthetic gluten; 5' sequence and inner sequence

SEQ ID NO: 41172 - DNA, 53 bp, Artificial Sequence
  Description of Artificial Sequence: Synthetic gluten; 5' sequence and inner sequence
tagggaagagaaggacatatgatgtcacactctgaacgtcaatggtcgatgga

SEQ ID NO: 41173 - DNA, 53 bp, Artificial Sequence; identical to SEQ ID NO: 1811
  Description of Artificial Sequence: Synthetic gluten; 5' sequence and inner sequence

SEQ ID NO: 41174 - DNA, 53 bp, Artificial Sequence
  Description of Artificial Sequence: Synthetic gluten; 5' sequence and inner sequence
tagggaagagaaggacatatgatcatgtacgcaccacgtatgcaaatatcata

SEQ ID NO: 41175 - DNA, 53 bp, Artificial Sequence
  Description of Artificial Sequence: Synthetic gluten; 5' sequence and inner sequence
tagggaagagaaggacatatgatggcctgatcgaacctagagagtggcgcgga

SEQ ID NO: 41176 - DNA, 53 bp, Artificial Sequence
  Description of Artificial Sequence: Synthetic gluten; 5' sequence and inner sequence
tagggaagagaaggacatatgatcggaacagagagccgaagatacagtgtcac

SEQ ID NO: 41177 - DNA, 53 bp, Artificial Sequence; identical to SEQ ID NO: 29586
  Description of Artificial Sequence: Synthetic gluten; 5' sequence and inner sequence

SEQ ID NO: 41178 - DNA, 53 bp, Artificial Sequence; identical to SEQ ID NO: 5591
  Description of Artificial Sequence: Synthetic gluten; 5' sequence and inner sequence

SEQ ID NO: 41179 - DNA, 53 bp, Artificial Sequence
  Description of Artificial Sequence: Synthetic gluten; 5' sequence and inner sequence
tagggaagagaaggacatatgatgtacgcaatcgttacctagcaagctgggca

SEQ ID NO: 41180 - DNA, 53 bp, Artificial Sequence
  Description of Artificial Sequence: Synthetic gluten; 5' sequence and inner sequence
tagggaagagaaggacatatgatcaacaaaccggcactagatattggctcacg

SEQ ID NO: 41181 - DNA, 53 bp, Artificial Sequence
  Description of Artificial Sequence: Synthetic gluten; 5' sequence and inner sequence
tagggaagagaaggacatatgatggacgaaatgcccgaaagtgcgtcaacgta

SEQ ID NO: 41182 - DNA, 53 bp, Artificial Sequence
  Description of Artificial Sequence: Synthetic gluten; 5' sequence and inner sequence
tagggaagagaaggacatatgatgaacggcgcgacctatcaggtgagcatgga

SEQ ID NO: 41183 - DNA, 53 bp, Artificial Sequence; identical to SEQ ID NO: 1208
  Description of Artificial Sequence: Synthetic gluten; 5' sequence and inner sequence

SEQ ID NO: 41184 - DNA, 53 bp, Artificial Sequence
  Description of Artificial Sequence: Synthetic gluten; 5' sequence and inner sequence
tagggaagagaaggacatatgattggactgaacgaaccgaatcatgatgcgca

SEQ ID NO: 41185 - DNA, 53 bp, Artificial Sequence; identical to SEQ ID NO: 1020
  Description of Artificial Sequence: Synthetic gluten; 5' sequence and inner sequence

SEQ ID NO: 41186 - DNA, 53 bp, Artificial Sequence; identical to SEQ ID NO: 1740
  Description of Artificial Sequence: Synthetic gluten; 5' sequence and inner sequence

SEQ ID NO: 41187 - DNA, 53 bp, Artificial Sequence; identical to SEQ ID NO: 37552
  Description of Artificial Sequence: Synthetic gluten; 5' sequence and inner sequence

SEQ ID NO: 41188 - DNA, 53 bp, Artificial Sequence
  Description of Artificial Sequence: Synthetic gluten; 5' sequence and inner sequence
tagggaagagaaggacatatgataatacgtccgaatctggatgtgcgaatgta

SEQ ID NO: 41189 - DNA, 53 bp, Artificial Sequence
  Description of Artificial Sequence: Synthetic gluten; 5' sequence and inner sequence
tagggaagagaaggacatatgatgaccaagcgatacctagcaagtgtggaatg

SEQ ID NO: 41190 - DNA, 53 bp, Artificial Sequence; identical to SEQ ID NO: 29849
  Description of Artificial Sequence: Synthetic gluten; 5' sequence and inner sequence

SEQ ID NO: 41191 - DNA, 53 bp, Artificial Sequence
  Description of Artificial Sequence: Synthetic gluten; 5' sequence and inner sequence
tagggaagagaaggacatatgatgaccgagcgacctatagagcatgcacttgc

SEQ ID NO: 41192 - DNA, 53 bp, Artificial Sequence; identical to SEQ ID NO: 29452
  Description of Artificial Sequence: Synthetic gluten; 5' sequence and inner sequence

SEQ ID NO: 41193 - DNA, 53 bp, Artificial Sequence; identical to SEQ ID NO: 1004
  Description of Artificial Sequence: Synthetic gluten; 5' sequence and inner sequence

SEQ ID NO: 41194 - DNA, 53 bp, Artificial Sequence
  Description of Artificial Sequence: Synthetic gluten; 5' sequence and inner sequence
tagggaagagaaggacatatgatgtacgatgcgaccgaagtgatcacagcagc

SEQ ID NO: 41195 - DNA, 53 bp, Artificial Sequence
  Description of Artificial Sequence: Synthetic gluten; 5' sequence and inner sequence
tagggaagagaaggacatatgatgacattcgctgaacgttcaagggacgtgga

SEQ ID NO: 41196 - DNA, 53 bp, Artificial Sequence
  Description of Artificial Sequence: Synthetic gluten; 5' sequence and inner sequence
tagggaagagaaggacatatgatgacgcctcgtaccctgaaagtgcgagtgta

SEQ ID NO: 41197 - DNA, 53 bp, Artificial Sequence
  Description of Artificial Sequence: Synthetic gluten; 5' sequence and inner sequence
tagggaagagaaggacatatgatggcatgcgctgggcagtgatcacgtacggt

SEQ ID NO: 41198 - DNA, 53 bp, Artificial Sequence
  Description of Artificial Sequence: Synthetic gluten; 5' sequence and inner sequence
tagggaagagaaggacatatgatcatgctcgtaacacagacaaacagttcata

SEQ ID NO: 41199 - DNA, 53 bp, Artificial Sequence; identical to SEQ ID NO: 1346
  Description of Artificial Sequence: Synthetic gluten; 5' sequence and inner sequence

SEQ ID NO: 41200 - DNA, 53 bp, Artificial Sequence
  Description of Artificial Sequence: Synthetic gluten; 5' sequence and inner sequence
tagggaagagaaggacatatgattggccgatcgaccctatcaagtgcagcacg

SEQ ID NO: 41201 - DNA, 53 bp, Artificial Sequence
  Description of Artificial Sequence: Synthetic gluten; 5' sequence and inner sequence
tagggaagagaaggacatatgatggcctgagctggcattgcgctggacatgta

SEQ ID NO: 41202 - DNA, 53 bp, Artificial Sequence; identical to SEQ ID NO: 37873
  Description of Artificial Sequence: Synthetic gluten; 5' sequence and inner sequence

SEQ ID NO: 41203 - DNA, 53 bp, Artificial Sequence; identical to SEQ ID NO: 17949
  Description of Artificial Sequence: Synthetic gluten; 5' sequence and inner sequence

SEQ ID NO: 41204 - DNA, 53 bp, Artificial Sequence
  Description of Artificial Sequence: Synthetic gluten; 5' sequence and inner sequence
tagggaagagaaggacatatgattcgacgcagtcaaacgcatatgacgcactc

SEQ ID NO: 41205 - DNA, 53 bp, Artificial Sequence; identical to SEQ ID NO: 37878
  Description of Artificial Sequence: Synthetic gluten; 5' sequence and inner sequence

SEQ ID NO: 41206 - DNA, 53 bp, Artificial Sequence
  Description of Artificial Sequence: Synthetic gluten; 5' sequence and inner sequence
tagggaagagaaggacatatgatcatgtacgatcaggaaagcggttcgtcata

SEQ ID NO: 41207 - DNA, 53 bp, Artificial Sequence
  Description of Artificial Sequence: Synthetic gluten; 5' sequence and inner sequence
tagggaagagaaggacatatgatcattcgatgagctagcgagtgccgtggacc

SEQ ID NO: 41208 - DNA, 53 bp, Artificial Sequence
  Description of Artificial Sequence: Synthetic gluten; 5' sequence and inner sequence
tagggaagagaaggacatatgatgacttcgatgaccgacatgtaacagtctta

SEQ ID NO: 41209 - DNA, 53 bp, Artificial Sequence
  Description of Artificial Sequence: Synthetic gluten; 5' sequence and inner sequence
tagggaagagaaggacatatgatcgataccatagagccgaagatcagtgcacg

SEQ ID NO: 41210 - DNA, 53 bp, Artificial Sequence
  Description of Artificial Sequence: Synthetic gluten; 5' sequence and inner sequence
tagggaagagaaggacatatgattgcatcacatgaaagcataggtcctgtggg

SEQ ID NO: 41211 - DNA, 53 bp, Artificial Sequence
  Description of Artificial Sequence: Synthetic gluten; 5' sequence and inner sequence
tagggaagagaaggacatatgatagattggcatgatctgaccgaaagtgcgtc

SEQ ID NO: 41212 - DNA, 53 bp, Artificial Sequence
  Description of Artificial Sequence: Synthetic gluten; 5' sequence and inner sequence
tagggaagagaaggacatatgattgtcctgaacgaccctatttgacctgcgca

SEQ ID NO: 41213 - DNA, 53 bp, Artificial Sequence
  Description of Artificial Sequence: Synthetic gluten; 5' sequence and inner sequence
tagggaagagaaggacatatgatcatgtgtccgaagcttcacgtatgtcagca

SEQ ID NO: 41214 - DNA, 53 bp, Artificial Sequence; identical to SEQ ID NO: 37384
  Description of Artificial Sequence: Synthetic gluten; 5' sequence and inner sequence

SEQ ID NO: 41215 - DNA, 53 bp, Artificial Sequence; identical to SEQ ID NO: 1018
  Description of Artificial Sequence: Synthetic gluten; 5' sequence and inner sequence

SEQ ID NO: 41216 - DNA, 53 bp, Artificial Sequence; identical to SEQ ID NO: 1686
  Description of Artificial Sequence: Synthetic gluten; 5' sequence and inner sequence

SEQ ID NO: 41217 - DNA, 53 bp, Artificial Sequence; identical to SEQ ID NO: 9922
  Description of Artificial Sequence: Synthetic gluten; 5' sequence and inner sequence

SEQ ID NO: 41218 - DNA, 53 bp, Artificial Sequence
  Description of Artificial Sequence: Synthetic gluten; 5' sequence and inner sequence
tagggaagagaaggacatatgatgtactgagcgaaccgcatcgtgatcatgga

SEQ ID NO: 41219 - DNA, 53 bp, Artificial Sequence
  Description of Artificial Sequence: Synthetic gluten; 5' sequence and inner sequence
tagggaagagaaggacatatgatagcatgtcggacgatggatgtgagcatgta

SEQ ID NO: 41220 - DNA, 53 bp, Artificial Sequence; identical to SEQ ID NO: 37974
  Description of Artificial Sequence: Synthetic gluten; 5' sequence and inner sequence

SEQ ID NO: 41221 - DNA, 53 bp, Artificial Sequence
  Description of Artificial Sequence: Synthetic gluten; 5' sequence and inner sequence
tagggaagagaaggacatatgatgtacgacgcggaccctatcaagacggcatg

SEQ ID NO: 41222 - DNA, 53 bp, Artificial Sequence; identical to SEQ ID NO: 1054
  Description of Artificial Sequence: Synthetic gluten; 5' sequence and inner sequence

SEQ ID NO: 41223 - DNA, 53 bp, Artificial Sequence; identical to SEQ ID NO: 37839
  Description of Artificial Sequence: Synthetic gluten; 5' sequence and inner sequence

SEQ ID NO: 41224 - DNA, 53 bp, Artificial Sequence
  Description of Artificial Sequence: Synthetic gluten; 5' sequence and inner sequence
tagggaagagaaggacatatgatggactgcgatggaatgtgcgaatgtacgca

SEQ ID NO: 41225 - DNA, 53 bp, Artificial Sequence
  Description of Artificial Sequence: Synthetic gluten; 5' sequence and inner sequence
tagggaagagaaggacatatgatccgtgaggacgcaaggttgatgtaagagtc

SEQ ID NO: 41226 - DNA, 53 bp, Artificial Sequence
  Description of Artificial Sequence: Synthetic gluten; 5' sequence and inner sequence
tagggaagagaaggacatatgatccgaacgacctgtcacgtctaggcaacaca

SEQ ID NO: 41227 - DNA, 53 bp, Artificial Sequence
  Description of Artificial Sequence: Synthetic gluten; 5' sequence and inner sequence
tagggaagagaaggacatatgatcatggctaacaaagggcgactgagctcata

SEQ ID NO: 41228 - DNA, 53 bp, Artificial Sequence
  Description of Artificial Sequence: Synthetic gluten; 5' sequence and inner sequence
tagggaagagaaggacatatgatgtactgcgcgaacgatcgagtgggcctgga

SEQ ID NO: 41229 - DNA, 53 bp, Artificial Sequence
  Description of Artificial Sequence: Synthetic gluten; 5' sequence and inner sequence
tagggaagagaaggacatatgatgtctgacgaggacctgagagtgcgcatgta

SEQ ID NO: 41230 - DNA, 53 bp, Artificial Sequence
  Description of Artificial Sequence: Synthetic gluten; 5' sequence and inner sequence
tagggaagagaaggacatatgatccgtagcgtcacctatcatgtggccaggta

SEQ ID NO: 41231 - DNA, 53 bp, Artificial Sequence
  Description of Artificial Sequence: Synthetic gluten; 5' sequence and inner sequence
tagggaagagaaggacatatgatggcctgcgagtacctacgagtgatcaggta

SEQ ID NO: 41232 - DNA, 53 bp, Artificial Sequence; identical to SEQ ID NO: 1079
  Description of Artificial Sequence: Synthetic gluten; 5' sequence and inner sequence

SEQ ID NO: 41233 - DNA, 53 bp, Artificial Sequence; identical to SEQ ID NO: 1389
  Description of Artificial Sequence: Synthetic gluten; 5' sequence and inner sequence

SEQ ID NO: 41234 - DNA, 53 bp, Artificial Sequence; identical to SEQ ID NO: 29298
  Description of Artificial Sequence: Synthetic gluten; 5' sequence and inner sequence

SEQ ID NO: 41235 - DNA, 53 bp, Artificial Sequence; identical to SEQ ID NO: 1310
  Description of Artificial Sequence: Synthetic gluten; 5' sequence and inner sequence

SEQ ID NO: 41236 - DNA, 53 bp, Artificial Sequence
  Description of Artificial Sequence: Synthetic gluten; 5' sequence and inner sequence
tagggaagagaaggacatatgatgcgtgcaccctttagcagcttgcgtcaaca

SEQ ID NO: 41237 - DNA, 53 bp, Artificial Sequence; identical to SEQ ID NO: 1061
  Description of Artificial Sequence: Synthetic gluten; 5' sequence and inner sequence

SEQ ID NO: 41238 - DNA, 53 bp, Artificial Sequence; identical to SEQ ID NO: 1111
  Description of Artificial Sequence: Synthetic gluten; 5' sequence and inner sequence

SEQ ID NO: 41239 - DNA, 53 bp, Artificial Sequence
  Description of Artificial Sequence: Synthetic gluten; 5' sequence and inner sequence
tagggaagagaaggacatatgattcagagccgaagaccaggcataacgaagta

SEQ ID NO: 41240 - DNA, 53 bp, Artificial Sequence
  Description of Artificial Sequence: Synthetic gluten; 5' sequence and inner sequence
tagggaagagaaggacatatgatggactgagctggatgtggctgcactagtgt

SEQ ID NO: 41241 - DNA, 53 bp, Artificial Sequence
  Description of Artificial Sequence: Synthetic gluten; 5' sequence and inner sequence
tagggaagagaaggacatatgatacgtacgtgctgaacgaccttcaagggaca

SEQ ID NO: 41242 - DNA, 53 bp, Artificial Sequence
  Description of Artificial Sequence: Synthetic gluten; 5' sequence and inner sequence
tagggaagagaaggacatatgatagtatgacatcgcgaccctacgagtggaca

SEQ ID NO: 41243 - DNA, 53 bp, Artificial Sequence
  Description of Artificial Sequence: Synthetic gluten; 5' sequence and inner sequence
tagggaagagaaggacatatgatcatggccgagcggagataagcttgcagcta

SEQ ID NO: 41244 - DNA, 53 bp, Artificial Sequence; identical to SEQ ID NO: 1067
  Description of Artificial Sequence: Synthetic gluten; 5' sequence and inner sequence

SEQ ID NO: 41245 - DNA, 53 bp, Artificial Sequence
  Description of Artificial Sequence: Synthetic gluten; 5' sequence and inner sequence
tagggaagagaaggacatatgattagcacagcacatcacgagatatcgcgcac

SEQ ID NO: 41246 - DNA, 53 bp, Artificial Sequence
  Description of Artificial Sequence: Synthetic gluten; 5' sequence and inner sequence
tagggaagagaaggacatatgatcttcccgtcaggcaggcattgcacgcaggc

SEQ ID NO: 41247 - DNA, 53 bp, Artificial Sequence
  Description of Artificial Sequence: Synthetic gluten; 5' sequence and inner sequence
tagggaagagaaggacatatgatggcctgcgatgaccggtctgtataggcaat

SEQ ID NO: 41248 - DNA, 53 bp, Artificial Sequence
  Description of Artificial Sequence: Synthetic gluten; 5' sequence and inner sequence
tagggaagagaaggacatatgatggccggcgatggatgtgaaatggcttgtct

SEQ ID NO: 41249 - DNA, 53 bp, Artificial Sequence
  Description of Artificial Sequence: Synthetic gluten; 5' sequence and inner sequence
tagggaagagaaggacatatgattggactgcgagtcacacaagtgcatgtcta

SEQ ID NO: 41250 - DNA, 53 bp, Artificial Sequence
  Description of Artificial Sequence: Synthetic gluten; 5' sequence and inner sequence
tagggaagagaaggacatatgatcgtacatgagtggcgacatcccctttgtca

SEQ ID NO: 41251 - DNA, 53 bp, Artificial Sequence; identical to SEQ ID NO: 9950
  Description of Artificial Sequence: Synthetic gluten; 5' sequence and inner sequence

SEQ ID NO: 41252 - DNA, 53 bp, Artificial Sequence; identical to SEQ ID NO: 5592
  Description of Artificial Sequence: Synthetic gluten; 5' sequence and inner sequence

SEQ ID NO: 41253 - DNA, 53 bp, Artificial Sequence
  Description of Artificial Sequence: Synthetic gluten; 5' sequence and inner sequence
tagggaagagaaggacatatgatgtacgtcgaggccctacaagtgagagggta

SEQ ID NO: 41254 - DNA, 53 bp, Artificial Sequence; identical to SEQ ID NO: 1548
  Description of Artificial Sequence: Synthetic gluten; 5' sequence and inner sequence

SEQ ID NO: 41255 - DNA, 53 bp, Artificial Sequence
  Description of Artificial Sequence: Synthetic gluten; 5' sequence and inner sequence
tagggaagagaaggacatatgattgtccgacgcgaccatatcaagtgcatgga

SEQ ID NO: 41256 - DNA, 53 bp, Artificial Sequence
  Description of Artificial Sequence: Synthetic gluten; 5' sequence and inner sequence
tagggaagagaaggacatatgatcatggccgagagaagctacactaaggcaca

SEQ ID NO: 41257 - DNA, 52 bp, Artificial Sequence
  Description of Artificial Sequence: Synthetic gluten; 5' sequence and inner sequence
tagggaagagaaggacatatgatgacgcactctaccctacatgcactacgtc

SEQ ID NO: 41258 - DNA, 53 bp, Artificial Sequence; identical to SEQ ID NO: 9682
  Description of Artificial Sequence: Synthetic gluten; 5' sequence and inner sequence

SEQ ID NO: 41259 - DNA, 53 bp, Artificial Sequence
  Description of Artificial Sequence: Synthetic gluten; 5' sequence and inner sequence
tagggaagagaaggacatatgatcgcaccctatcacgtggaagtgaacttggc

SEQ ID NO: 41260 - DNA, 48 bp, Artificial Sequence
  Description of Artificial Sequence: Synthetic gluten; 5' sequence and inner sequence
tagggaagagaaggacatatgatggcctgcgatggatgtgtgcatgta

SEQ ID NO: 41261 - DNA, 53 bp, Artificial Sequence
  Description of Artificial Sequence: Synthetic gluten; 5' sequence and inner sequence
tagggaagagaaggacatatgatcatgtcgagaccagtgcactttgcagcata

SEQ ID NO: 41262 - DNA, 53 bp, Artificial Sequence
  Description of Artificial Sequence: Synthetic gluten; 5' sequence and inner sequence
tagggaagagaaggacatatgatcaaccgactgcaagtaccatatggctcacg

SEQ ID NO: 41263 - DNA, 53 bp, Artificial Sequence
  Description of Artificial Sequence: Synthetic gluten; 5' sequence and inner sequence
tagggaagagaaggacatatgatggcctgatcgaacctagcgagtggcgtgga

SEQ ID NO: 41264 - DNA, 53 bp, Artificial Sequence
  Description of Artificial Sequence: Synthetic gluten; 5' sequence and inner sequence
tagggaagagaaggacatatgatcaacaaatcgcggactcgtaatgtctcacg

SEQ ID NO: 41265 - DNA, 53 bp, Artificial Sequence; identical to SEQ ID NO: 1048
  Description of Artificial Sequence: Synthetic gluten; 5' sequence and inner sequence

SEQ ID NO: 41266 - DNA, 53 bp, Artificial Sequence
  Description of Artificial Sequence: Synthetic gluten; 5' sequence and inner sequence
tagggaagagaaggacatatgatcctccgaggcagctatctcatggacgcgaa

SEQ ID NO: 41267 - DNA, 53 bp, Artificial Sequence
  Description of Artificial Sequence: Synthetic gluten; 5' sequence and inner sequence
tagggaagagaaggacatatgatgacgacgatgacctagtaatggacgtgttc

SEQ ID NO: 41268 - DNA, 53 bp, Artificial Sequence
  Description of Artificial Sequence: Synthetic gluten; 5' sequence and inner sequence
tagggaagagaaggacatatgatcgggaggctgaaaggaacagttcacgcaac

SEQ ID NO: 41269 - DNA, 53 bp, Artificial Sequence
  Description of Artificial Sequence: Synthetic gluten; 5' sequence and inner sequence
tagggaagagaaggacatatgatggccgcggcttccctgaaatggacgcagcg

SEQ ID NO: 41270 - DNA, 53 bp, Artificial Sequence; identical to SEQ ID NO: 1076
  Description of Artificial Sequence: Synthetic gluten; 5' sequence and inner sequence

SEQ ID NO: 41271 - DNA, 53 bp, Artificial Sequence; identical to SEQ ID NO: 1154
  Description of Artificial Sequence: Synthetic gluten; 5' sequence and inner sequence

SEQ ID NO: 41272 - DNA, 53 bp, Artificial Sequence
  Description of Artificial Sequence: Synthetic gluten; 5' sequence and inner sequence
tagggaagagaaggacatatgatggactgcgatgagctcaaggggagcatgga

SEQ ID NO: 41273 - DNA, 53 bp, Artificial Sequence
  Description of Artificial Sequence: Synthetic gluten; 5' sequence and inner sequence
tagggaagagaaggacatatgataatgtggacggctcgaaccctagctaggca

SEQ ID NO: 41274 - DNA, 53 bp, Artificial Sequence
  Description of Artificial Sequence: Synthetic gluten; 5' sequence and inner sequence
tagggaagagaaggacatatgatgacagcgcagatgaagaatacgacgactct

SEQ ID NO: 41275 - DNA, 53 bp, Artificial Sequence
  Description of Artificial Sequence: Synthetic gluten; 5' sequence and inner sequence
tagggaagagaaggacatatgatcatgacgcagtaagcacgtatcgtggcata

SEQ ID NO: 41276 - DNA, 53 bp, Artificial Sequence
  Description of Artificial Sequence: Synthetic gluten; 5' sequence and inner sequence
tagggaagagaaggacatatgatgtcatgcacagaccggtaagtgctcaggta

SEQ ID NO: 41277 - DNA, 53 bp, Artificial Sequence; identical to SEQ ID NO: 5552
  Description of Artificial Sequence: Synthetic gluten; 5' sequence and inner sequence

SEQ ID NO: 41278 - DNA, 53 bp, Artificial Sequence; identical to SEQ ID NO: 1362
  Description of Artificial Sequence: Synthetic gluten; 5' sequence and inner sequence

SEQ ID NO: 41279 - DNA, 53 bp, Artificial Sequence; identical to SEQ ID NO: 1850
  Description of Artificial Sequence: Synthetic gluten; 5' sequence and inner sequence

SEQ ID NO: 41280 - DNA, 53 bp, Artificial Sequence
  Description of Artificial Sequence: Synthetic gluten; 5' sequence and inner sequence
tagggaagagaaggacatatgatcgaacacgcacgtgctttgaggactagagg

SEQ ID NO: 41281 - DNA, 53 bp, Artificial Sequence
  Description of Artificial Sequence: Synthetic gluten; 5' sequence and inner sequence
tagggaagagaaggacatatgatggcatgcgctgggaagtgatcacgtacggt

SEQ ID NO: 41282 - DNA, 53 bp, Artificial Sequence
  Description of Artificial Sequence: Synthetic gluten; 5' sequence and inner sequence
tagggaagagaaggacatatgatgcactgagcgaacccttgtcatgggacgta

SEQ ID NO: 41283 - DNA, 53 bp, Artificial Sequence
  Description of Artificial Sequence: Synthetic gluten; 5' sequence and inner sequence
tagggaagagaaggacatatgatcaatcacatggtgcggactgatggttcaag

SEQ ID NO: 41284 - DNA, 53 bp, Artificial Sequence
  Description of Artificial Sequence: Synthetic gluten; 5' sequence and inner sequence
tagggaagagaaggacatatgatggcccgacgacccttcaagtgaccatcgta

SEQ ID NO: 41285 - DNA, 53 bp, Artificial Sequence
  Description of Artificial Sequence: Synthetic gluten; 5' sequence and inner sequence
tagggaagagaaggacatatgatgtcatgcactgatccgacaatgggcgtgaa

SEQ ID NO: 41286 - DNA, 53 bp, Artificial Sequence; identical to SEQ ID NO: 1355
  Description of Artificial Sequence: Synthetic gluten; 5' sequence and inner sequence

SEQ ID NO: 41287 - DNA, 53 bp, Artificial Sequence
  Description of Artificial Sequence: Synthetic gluten; 5' sequence and inner sequence
tagggaagagaaggacatatgatcatgttcggaccagagcggtctccggcata

SEQ ID NO: 41288 - DNA, 53 bp, Artificial Sequence
  Description of Artificial Sequence: Synthetic gluten; 5' sequence and inner sequence
tagggaagagaaggacatatgatggcattcgacctgcctatcaagggtgctca

SEQ ID NO: 41289 - DNA, 53 bp, Artificial Sequence
  Description of Artificial Sequence: Synthetic gluten; 5' sequence and inner sequence
tagggaagagaaggacatatgattgctagtgcaagcagagggcattcgaaggg

SEQ ID NO: 41290 - DNA, 53 bp, Artificial Sequence
  Description of Artificial Sequence: Synthetic gluten; 5' sequence and inner sequence
tagggaagagaaggacatatgatggactgatcaaccctaagcatgtggcgatg

SEQ ID NO: 41291 - DNA, 53 bp, Artificial Sequence
  Description of Artificial Sequence: Synthetic gluten; 5' sequence and inner sequence
tagggaagagaaggacatatgatgcgagcggacctaaagaacatgtcgttggc

SEQ ID NO: 41292 - DNA, 53 bp, Artificial Sequence
  Description of Artificial Sequence: Synthetic gluten; 5' sequence and inner sequence
tagggaagagaaggacatatgatagtcacaggaagcaccggaccgattcgtca

SEQ ID NO: 41293 - DNA, 53 bp, Artificial Sequence
  Description of Artificial Sequence: Synthetic gluten; 5' sequence and inner sequence
tagggaagagaaggacatatgatccgaaccgacatgctaatgaagtgtacgta

SEQ ID NO: 41294 - DNA, 53 bp, Artificial Sequence
  Description of Artificial Sequence: Synthetic gluten; 5' sequence and inner sequence
tagggaagagaaggacatatgatgcaacgcagcatggacgaatctggatgtgg

SEQ ID NO: 41295 - DNA, 53 bp, Artificial Sequence
  Description of Artificial Sequence: Synthetic gluten; 5' sequence and inner sequence
tagggaagagaaggacatatgatggcatgatcgaacctagagagtggcgtgga

SEQ ID NO: 41296 - DNA, 53 bp, Artificial Sequence
  Description of Artificial Sequence: Synthetic gluten; 5' sequence and inner sequence
tagggaagagaaggacatatgatgtcatgcgcggacattcaagctggcgtgga

SEQ ID NO: 41297 - DNA, 53 bp, Artificial Sequence
  Description of Artificial Sequence: Synthetic gluten; 5' sequence and inner sequence
tagggaagagaaggacatatgatggactgatcgaacctagagagtggcgtgga

SEQ ID NO: 41298 - DNA, 53 bp, Artificial Sequence
  Description of Artificial Sequence: Synthetic gluten; 5' sequence and inner sequence
tagggaagagaaggacatatgatcatgtgcgatcagagcggtgcaccggcata

SEQ ID NO: 41299 - DNA, 53 bp, Artificial Sequence
  Description of Artificial Sequence: Synthetic gluten; 5' sequence and inner sequence
tagggaagagaaggacatatgataccgtcaggcagaagaggactgagcgcaca

SEQ ID NO: 41300 - DNA, 53 bp, Artificial Sequence; identical to SEQ ID NO: 1329
  Description of Artificial Sequence: Synthetic gluten; 5' sequence and inner sequence

SEQ ID NO: 41301 - DNA, 53 bp, Artificial Sequence
  Description of Artificial Sequence: Synthetic gluten; 5' sequence and inner sequence
tagggaagagaaggacatatgattcgcatatggctacgatgaccgatgtgggc

SEQ ID NO: 41302 - DNA, 53 bp, Artificial Sequence
  Description of Artificial Sequence: Synthetic gluten; 5' sequence and inner sequence
tagggaagagaaggacatatgatcgcaacgcctcttggtgcatcgccatgtct

SEQ ID NO: 41303 - DNA, 53 bp, Artificial Sequence; identical to SEQ ID NO: 1030
  Description of Artificial Sequence: Synthetic gluten; 5' sequence and inner sequence

SEQ ID NO: 41304 - DNA, 48 bp, Artificial Sequence
  Description of Artificial Sequence: Synthetic gluten; 5' sequence and inner sequence
tagggaagagaaggacatatgatggcatgcgatggatgtgtgcgtgta

SEQ ID NO: 41305 - DNA, 53 bp, Artificial Sequence
  Description of Artificial Sequence: Synthetic gluten; 5' sequence and inner sequence
tagggaagagaaggacatatgatactcccctagcatgagtgggctatgaagca

SEQ ID NO: 41306 - DNA, 53 bp, Artificial Sequence
  Description of Artificial Sequence: Synthetic gluten; 5' sequence and inner sequence
tagggaagagaaggacatatgatccgatcgaagctaaagagcatgaacgtggc

SEQ ID NO: 41307 - DNA, 53 bp, Artificial Sequence; identical to SEQ ID NO: 1800
  Description of Artificial Sequence: Synthetic gluten; 5' sequence and inner sequence

SEQ ID NO: 41308 - DNA, 53 bp, Artificial Sequence
  Description of Artificial Sequence: Synthetic gluten; 5' sequence and inner sequence
tagggaagagaaggacatatgatcatgtacgaccgcaaaggctcagctcaata

SEQ ID NO: 41309 - DNA, 53 bp, Artificial Sequence
  Description of Artificial Sequence: Synthetic gluten; 5' sequence and inner sequence
tagggaagagaaggacatatgatggacttcgcgaacttcatggctggcatcca

SEQ ID NO: 41310 - DNA, 53 bp, Artificial Sequence; identical to SEQ ID NO: 37617
  Description of Artificial Sequence: Synthetic gluten; 5' sequence and inner sequence

SEQ ID NO: 41311 - DNA, 53 bp, Artificial Sequence
  Description of Artificial Sequence: Synthetic gluten; 5' sequence and inner sequence
tagggaagagaaggacatatgatggacgaagcttccctgctactacgtcacga

SEQ ID NO: 41312 - DNA, 53 bp, Artificial Sequence
  Description of Artificial Sequence: Synthetic gluten; 5' sequence and inner sequence
tagggaagagaaggacatatgatggccgacgatggatgtagttatggaccagc

SEQ ID NO: 41313 - DNA, 53 bp, Artificial Sequence
  Description of Artificial Sequence: Synthetic gluten; 5' sequence and inner sequence
tagggaagagaaggacatatgatccgcactctggatgggtcacgcacgagtca

SEQ ID NO: 41314 - DNA, 53 bp, Artificial Sequence
  Description of Artificial Sequence: Synthetic gluten; 5' sequence and inner sequence
tagggaagagaaggacatatgataatacgcccgaccttacctacacgtgatca

SEQ ID NO: 41315 - DNA, 53 bp, Artificial Sequence
  Description of Artificial Sequence: Synthetic gluten; 5' sequence and inner sequence
tagggaagagaaggacatatgatccatatggcaggcgattaccgatgtgcgta

SEQ ID NO: 41316 - DNA, 53 bp, Artificial Sequence; identical to SEQ ID NO: 37722
  Description of Artificial Sequence: Synthetic gluten; 5' sequence and inner sequence

SEQ ID NO: 41317 - DNA, 53 bp, Artificial Sequence
  Description of Artificial Sequence: Synthetic gluten; 5' sequence and inner sequence
tagggaagagaaggacatatgatacgtcacgggtaacaagcttgccaattgtg

SEQ ID NO: 41318 - DNA, 53 bp, Artificial Sequence
  Description of Artificial Sequence: Synthetic gluten; 5' sequence and inner sequence
tagggaagagaaggacatatgatcccagaatcacaacaaacgtgcacgctagc

SEQ ID NO: 41319 - DNA, 53 bp, Artificial Sequence
  Description of Artificial Sequence: Synthetic gluten; 5' sequence and inner sequence
tagggaagagaaggacatatgatcatgtacgacagaggtgcagagcagacata

SEQ ID NO: 41320 - DNA, 53 bp, Artificial Sequence
  Description of Artificial Sequence: Synthetic gluten; 5' sequence and inner sequence
tagggaagagaaggacatatgatggactgaacgagatctggcttgcaataggc

SEQ ID NO: 41321 - DNA, 53 bp, Artificial Sequence
  Description of Artificial Sequence: Synthetic gluten; 5' sequence and inner sequence
tagggaagagaaggacatatgatagtatggcctgcgatggatcgacgttcaca

SEQ ID NO: 41322 - DNA, 53 bp, Artificial Sequence; identical to SEQ ID NO: 1081
  Description of Artificial Sequence: Synthetic gluten; 5' sequence and inner sequence

SEQ ID NO: 41323 - DNA, 53 bp, Artificial Sequence
  Description of Artificial Sequence: Synthetic gluten; 5' sequence and inner sequence
tagggaagagaaggacatatgatgacgccacgcagcctaatcgtgatcatgta

SEQ ID NO: 41324 - DNA, 53 bp, Artificial Sequence; identical to SEQ ID NO: 1392
  Description of Artificial Sequence: Synthetic gluten; 5' sequence and inner sequence

SEQ ID NO: 41325 - DNA, 53 bp, Artificial Sequence
  Description of Artificial Sequence: Synthetic gluten; 5' sequence and inner sequence
tagggaagagaaggacatatgattcagatggcatgaacggcatgacgacgtga

SEQ ID NO: 41326 - DNA, 53 bp, Artificial Sequence
  Description of Artificial Sequence: Synthetic gluten; 5' sequence and inner sequence
tagggaagagaaggacatatgatgcatgacggacttgaacgatctcctttggc

SEQ ID NO: 41327 - DNA, 53 bp, Artificial Sequence; identical to SEQ ID NO: 29644
  Description of Artificial Sequence: Synthetic gluten; 5' sequence and inner sequence

SEQ ID NO: 41328 - DNA, 53 bp, Artificial Sequence
  Description of Artificial Sequence: Synthetic gluten; 5' sequence and inner sequence
tagggaagagaaggacatatgatacatacgtacgaacgacctcaatgtgcgtc

SEQ ID NO: 41329 - DNA, 53 bp, Artificial Sequence
  Description of Artificial Sequence: Synthetic gluten; 5' sequence and inner sequence
tagggaagagaaggacatatgattctgcatggcctgaacgatccgtgccgtca

SEQ ID NO: 41330 - DNA, 52 bp, Artificial Sequence; identical to SEQ ID NO: 1334
  Description of Artificial Sequence: Synthetic gluten; 5' sequence and inner sequence

SEQ ID NO: 41331 - DNA, 53 bp, Artificial Sequence
  Description of Artificial Sequence: Synthetic gluten; 5' sequence and inner sequence
tagggaagagaaggacatatgatgtacgccgctccatcccttcaaggcagtca

SEQ ID NO: 41332 - DNA, 53 bp, Artificial Sequence
  Description of Artificial Sequence: Synthetic gluten; 5' sequence and inner sequence
tagggaagagaaggacatatgatcgccacgaaaccgtaaggttcagcaagtca

SEQ ID NO: 41333 - DNA, 53 bp, Artificial Sequence; identical to SEQ ID NO: 13933
  Description of Artificial Sequence: Synthetic gluten; 5' sequence and inner sequence

SEQ ID NO: 41334 - DNA, 53 bp, Artificial Sequence
  Description of Artificial Sequence: Synthetic gluten; 5' sequence and inner sequence
tagggaagagaaggacatatgatctgagtgaggacccaaggttgagtactgcc

SEQ ID NO: 41335 - DNA, 53 bp, Artificial Sequence
  Description of Artificial Sequence: Synthetic gluten; 5' sequence and inner sequence
tagggaagagaaggacatatgatcgtaccgacgtaaggagaaaggtatgggtt

SEQ ID NO: 41336 - DNA, 53 bp, Artificial Sequence
  Description of Artificial Sequence: Synthetic gluten; 5' sequence and inner sequence
tagggaagagaaggacatatgatcatcgtacggacgaaagcgttaacggcata

SEQ ID NO: 41337 - DNA, 53 bp, Artificial Sequence
  Description of Artificial Sequence: Synthetic gluten; 5' sequence and inner sequence
tagggaagagaaggacatatgatggccacgatgaacctacaggtgatcatgta

SEQ ID NO: 41338 - DNA, 53 bp, Artificial Sequence
  Description of Artificial Sequence: Synthetic gluten; 5' sequence and inner sequence
tagggaagagaaggacatatgatggcctgatcgcacctagagagtggcgtgga

SEQ ID NO: 41339 - DNA, 53 bp, Artificial Sequence
  Description of Artificial Sequence: Synthetic gluten; 5' sequence and inner sequence
tagggaagagaaggacatatgatgaccgccactccctagcaagcgcgaatgta

SEQ ID NO: 41340 - DNA, 53 bp, Artificial Sequence
  Description of Artificial Sequence: Synthetic gluten; 5' sequence and inner sequence
tagggaagagaaggacatatgatcatgactaaccatctgacggacagttcata

SEQ ID NO: 41341 - DNA, 53 bp, Artificial Sequence
  Description of Artificial Sequence: Synthetic gluten; 5' sequence and inner sequence
tagggaagagaaggacatatgatgagttcgcgatccttcaagtgcagcatgga

SEQ ID NO: 41342 - DNA, 53 bp, Artificial Sequence
  Description of Artificial Sequence: Synthetic gluten; 5' sequence and inner sequence
tagggaagagaaggacatatgattcaatatcggcactcgcatgaaagttccgt

SEQ ID NO: 41343 - DNA, 53 bp, Artificial Sequence
  Description of Artificial Sequence: Synthetic gluten; 5' sequence and inner sequence
tagggaagagaaggacatatgatggccgaaagctaagctagttaatggacaca

SEQ ID NO: 41344 - DNA, 53 bp, Artificial Sequence; identical to SEQ ID NO: 1021
  Description of Artificial Sequence: Synthetic gluten; 5' sequence and inner sequence

SEQ ID NO: 41345 - DNA, 53 bp, Artificial Sequence
  Description of Artificial Sequence: Synthetic gluten; 5' sequence and inner sequence
tagggaagagaaggacatatgatggccgaacgacatgatgcgtatggaaagta

SEQ ID NO: 41346 - DNA, 53 bp, Artificial Sequence
  Description of Artificial Sequence: Synthetic gluten; 5' sequence and inner sequence
tagggaagagaaggacatatgatgtcatgcgcggacattcaagttggcgcgga

SEQ ID NO: 41347 - DNA, 53 bp, Artificial Sequence
  Description of Artificial Sequence: Synthetic gluten; 5' sequence and inner sequence
tagggaagagaaggacatatgatcctgagcgcacccaacaatggcatggcgaa

SEQ ID NO: 41348 - DNA, 53 bp, Artificial Sequence
  Description of Artificial Sequence: Synthetic gluten; 5' sequence and inner sequence
tagggaagagaaggacatatgatggacggagcgaccgaaatggctagtcacgt

SEQ ID NO: 41349 - DNA, 53 bp, Artificial Sequence
  Description of Artificial Sequence: Synthetic gluten; 5' sequence and inner sequence
tagggaagagaaggacatatgattggaacgccgaataaaaggtgagatcgtgc

SEQ ID NO: 41350 - DNA, 53 bp, Artificial Sequence; identical to SEQ ID NO: 1567
  Description of Artificial Sequence: Synthetic gluten; 5' sequence and inner sequence

SEQ ID NO: 41351 - DNA, 53 bp, Artificial Sequence
  Description of Artificial Sequence: Synthetic gluten; 5' sequence and inner sequence
tagggaagagaaggacatatgatggcctgatcgaacctcgagagtggcgtgga

SEQ ID NO: 41352 - DNA, 52 bp, Artificial Sequence
  Description of Artificial Sequence: Synthetic gluten; 5' sequence and inner sequence
tagggaagagaaggacatatgatcatacagccgcagtttcggaccttcagcc

SEQ ID NO: 41353 - DNA, 53 bp, Artificial Sequence
  Description of Artificial Sequence: Synthetic gluten; 5' sequence and inner sequence
tagggaagagaaggacatatgatccgactcgaccaaagtaggagtgtacgtgt

SEQ ID NO: 41354 - DNA, 53 bp, Artificial Sequence
  Description of Artificial Sequence: Synthetic gluten; 5' sequence and inner sequence
tagggaagagaaggacatatgatcgacacgacgtatcgttagcttcgcggtca

SEQ ID NO: 41355 - DNA, 53 bp, Artificial Sequence; identical to SEQ ID NO: 29295
  Description of Artificial Sequence: Synthetic gluten; 5' sequence and inner sequence

SEQ ID NO: 41356 - DNA, 48 bp, Artificial Sequence
  Description of Artificial Sequence: Synthetic gluten; 5' sequence and inner sequence
tagggaagagaaggacatatgatggccgacgatggatgtgagcatgta

SEQ ID NO: 41357 - DNA, 53 bp, Artificial Sequence; identical to SEQ ID NO: 1813
  Description of Artificial Sequence: Synthetic gluten; 5' sequence and inner sequence

SEQ ID NO: 41358 - DNA, 53 bp, Artificial Sequence; identical to SEQ ID NO: 1783
  Description of Artificial Sequence: Synthetic gluten; 5' sequence and inner sequence

SEQ ID NO: 41359 - DNA, 53 bp, Artificial Sequence
  Description of Artificial Sequence: Synthetic gluten; 5' sequence and inner sequence
tagggaagagaaggacatatgatcgcgcctatcaacgtgccaggtacgacgaa

SEQ ID NO: 41360 - DNA, 53 bp, Artificial Sequence
  Description of Artificial Sequence: Synthetic gluten; 5' sequence and inner sequence
tagggaagagaaggacatatgatggcctgaactggatgtgcggaaggtacgag

SEQ ID NO: 41361 - DNA, 53 bp, Artificial Sequence
  Description of Artificial Sequence: Synthetic gluten; 5' sequence and inner sequence
tagggaagagaaggacatatgatcattcacatggccgtcgatggatctgggca

SEQ ID NO: 41362 - DNA, 53 bp, Artificial Sequence
  Description of Artificial Sequence: Synthetic gluten; 5' sequence and inner sequence
tagggaagagaaggacatatgattggccgaacttccctaaagaccagcactag

SEQ ID NO: 41363 - DNA, 53 bp, Artificial Sequence
  Description of Artificial Sequence: Synthetic gluten; 5' sequence and inner sequence
tagggaagagaaggacatatgatggacgacgcgagctagcaaggaggcgtgta

SEQ ID NO: 41364 - DNA, 53 bp, Artificial Sequence
  Description of Artificial Sequence: Synthetic gluten; 5' sequence and inner sequence
tagggaagagaaggacatatgatggccgacgaagaccttaaagtgatcgtgta

SEQ ID NO: 41365 - DNA, 53 bp, Artificial Sequence
  Description of Artificial Sequence: Synthetic gluten; 5' sequence and inner sequence
tagggaagagaaggacatatgatgtcatgcgcggacattcaaggtggcgtgga

SEQ ID NO: 41366 - DNA, 53 bp, Artificial Sequence
  Description of Artificial Sequence: Synthetic gluten; 5' sequence and inner sequence
tagggaagagaaggacatatgatcatgacggaacgtagctcggcagagtcata

SEQ ID NO: 41367 - DNA, 53 bp, Artificial Sequence
  Description of Artificial Sequence: Synthetic gluten; 5' sequence and inner sequence
tagggaagagaaggacatatgatgcccgagcgaacctagcatgtgggatcgta

SEQ ID NO: 41368 - DNA, 54 bp, Artificial Sequence; identical to SEQ ID NO: 1503
  Description of Artificial Sequence: Synthetic gluten; 5' sequence and inner sequence

SEQ ID NO: 41369 - DNA, 53 bp, Artificial Sequence
  Description of Artificial Sequence: Synthetic gluten; 5' sequence and inner sequence
tagggaagagaaggacatatgatggcatgcgatggatgtggaaatgcgacgtc

SEQ ID NO: 41370 - DNA, 53 bp, Artificial Sequence; identical to SEQ ID NO: 1288
  Description of Artificial Sequence: Synthetic gluten; 5' sequence and inner sequence

SEQ ID NO: 41371 - DNA, 53 bp, Artificial Sequence
  Description of Artificial Sequence: Synthetic gluten; 5' sequence and inner sequence
tagggaagagaaggacatatgatcaaactgacagggcaaagctatgtctcacc

SEQ ID NO: 41372 - DNA, 53 bp, Artificial Sequence
  Description of Artificial Sequence: Synthetic gluten; 5' sequence and inner sequence
tagggaagagaaggacatatgatgtacgtctcggatgaggtcttgaacgcggt

SEQ ID NO: 41373 - DNA, 53 bp, Artificial Sequence
  Description of Artificial Sequence: Synthetic gluten; 5' sequence and inner sequence
tagggaagagaaggacatatgatccgttgatgaccaagagcatgaacgaggca

SEQ ID NO: 41374 - DNA, 53 bp, Artificial Sequence
  Description of Artificial Sequence: Synthetic gluten; 5' sequence and inner sequence
tagggaagagaaggacatatgatttgagccgaagacacccctacgatcttggg

SEQ ID NO: 41375 - DNA, 53 bp, Artificial Sequence
  Description of Artificial Sequence: Synthetic gluten; 5' sequence and inner sequence
tagggaagagaaggacatatgattggtcgcactcttcacgtcacaagcggaca

SEQ ID NO: 41376 - DNA, 53 bp, Artificial Sequence
  Description of Artificial Sequence: Synthetic gluten; 5' sequence and inner sequence
tagggaagagaaggacatatgatggcctgaaaagcgagaaggagcctacaagg

SEQ ID NO: 41377 - DNA, 53 bp, Artificial Sequence
  Description of Artificial Sequence: Synthetic gluten; 5' sequence and inner sequence
tagggaagagaaggacatatgatgccacagcgacctcaagtaggctggacgta

SEQ ID NO: 41378 - DNA, 53 bp, Artificial Sequence; identical to SEQ ID NO: 1529
  Description of Artificial Sequence: Synthetic gluten; 5' sequence and inner sequence

SEQ ID NO: 41379 - DNA, 53 bp, Artificial Sequence; identical to SEQ ID NO: 1504
  Description of Artificial Sequence: Synthetic gluten; 5' sequence and inner sequence

SEQ ID NO: 41380 - DNA, 53 bp, Artificial Sequence; identical to SEQ ID NO: 5406
  Description of Artificial Sequence: Synthetic gluten; 5' sequence and inner sequence

SEQ ID NO: 41381 - DNA, 53 bp, Artificial Sequence
  Description of Artificial Sequence: Synthetic gluten; 5' sequence and inner sequence
tagggaagagaaggacatatgatgacgctaggaggcctaaatgcgtgaacata

SEQ ID NO: 41382 - DNA, 53 bp, Artificial Sequence
  Description of Artificial Sequence: Synthetic gluten; 5' sequence and inner sequence
tagggaagagaaggacatatgatggcattcgatgcactacaagctgttgtgta

SEQ ID NO: 41383 - DNA, 53 bp, Artificial Sequence
  Description of Artificial Sequence: Synthetic gluten; 5' sequence and inner sequence
tagggaagagaaggacatatgatcatgcatggggagcagtggcttagctgaca

SEQ ID NO: 41384 - DNA, 53 bp, Artificial Sequence
  Description of Artificial Sequence: Synthetic gluten; 5' sequence and inner sequence
tagggaagagaaggacatatgatcatgtaccaagagttacgttcaccggcata

SEQ ID NO: 41385 - DNA, 52 bp, Artificial Sequence
  Description of Artificial Sequence: Synthetic gluten; 5' sequence and inner sequence
tagggaagagaaggacatatgatgccctgcgatgaccgaaagtgggttggac

SEQ ID NO: 41386 - DNA, 53 bp, Artificial Sequence; identical to SEQ ID NO: 1673
  Description of Artificial Sequence: Synthetic gluten; 5' sequence and inner sequence

SEQ ID NO: 41387 - DNA, 53 bp, Artificial Sequence
  Description of Artificial Sequence: Synthetic gluten; 5' sequence and inner sequence
tagggaagagaaggacatatgatctggccggagagtagctacaaatgtcttca

SEQ ID NO: 41388 - DNA, 53 bp, Artificial Sequence
  Description of Artificial Sequence: Synthetic gluten; 5' sequence and inner sequence
tagggaagagaaggacatatgattcgggccacctacgcatcatcaacacgtgg

SEQ ID NO: 41389 - DNA, 53 bp, Artificial Sequence
  Description of Artificial Sequence: Synthetic gluten; 5' sequence and inner sequence
tagggaagagaaggacatatgatggactgcgatggatgaggtgctgcactagt

SEQ ID NO: 41390 - DNA, 53 bp, Artificial Sequence
  Description of Artificial Sequence: Synthetic gluten; 5' sequence and inner sequence
tagggaagagaaggacatatgataatgtggaatgaacgaccaagagcatggat

SEQ ID NO: 41391 - DNA, 53 bp, Artificial Sequence
  Description of Artificial Sequence: Synthetic gluten; 5' sequence and inner sequence
tagggaagagaaggacatatgatggcctgaacaaccgatagaacatggcgtaa

SEQ ID NO: 41392 - DNA, 53 bp, Artificial Sequence
  Description of Artificial Sequence: Synthetic gluten; 5' sequence and inner sequence
tagggaagagaaggacatatgatgtcatgcgcggacattcaagatggcgtgga

SEQ ID NO: 41393 - DNA, 53 bp, Artificial Sequence
  Description of Artificial Sequence: Synthetic gluten; 5' sequence and inner sequence
tagggaagagaaggacatatgatcttgcatatgaacgcgctctggatgtgggc

SEQ ID NO: 41394 - DNA, 53 bp, Artificial Sequence
  Description of Artificial Sequence: Synthetic gluten; 5' sequence and inner sequence
tagggaagagaaggacatatgatcattacgtacaaagggcgtgcagactcata

SEQ ID NO: 41395 - DNA, 53 bp, Artificial Sequence
  Description of Artificial Sequence: Synthetic gluten; 5' sequence and inner sequence
tagggaagagaaggacatatgatcttccacccaaagtccttcgagccggtgtc

SEQ ID NO: 41396 - DNA, 53 bp, Artificial Sequence
  Description of Artificial Sequence: Synthetic gluten; 5' sequence and inner sequence
tagggaagagaaggacatatgatggcctcgaagcccttcaagcggttcatgga

SEQ ID NO: 41397 - DNA, 53 bp, Artificial Sequence
  Description of Artificial Sequence: Synthetic gluten; 5' sequence and inner sequence
tagggaagagaaggacatatgatgtgctgagcttccctaagagtgcttgcgca

SEQ ID NO: 41398 - DNA, 53 bp, Artificial Sequence
  Description of Artificial Sequence: Synthetic gluten; 5' sequence and inner sequence
tagggaagagaaggacatatgattgaccgactcgaaccaggcatgactcggca

SEQ ID NO: 41399 - DNA, 53 bp, Artificial Sequence
  Description of Artificial Sequence: Synthetic gluten; 5' sequence and inner sequence
tagggaagagaaggacatatgattggacgacgattcccttggcaagctccgct

SEQ ID NO: 41400 - DNA, 53 bp, Artificial Sequence
  Description of Artificial Sequence: Synthetic gluten; 5' sequence and inner sequence
tagggaagagaaggacatatgatggactcgcgtcactatcacgggggcaggta

SEQ ID NO: 41401 - DNA, 54 bp, Artificial Sequence
  Description of Artificial Sequence: Synthetic gluten; 5' sequence and inner sequence
tagggaagagaaggacatatgatgtacgacgcgaacctatcaagggctcatgga

SEQ ID NO: 41402 - DNA, 53 bp, Artificial Sequence
  Description of Artificial Sequence: Synthetic gluten; 5' sequence and inner sequence
tagggaagagaaggacatatgattcgcgatgaccgaggaaatgtacgacggca

SEQ ID NO: 41403 - DNA, 53 bp, Artificial Sequence
  Description of Artificial Sequence: Synthetic gluten; 5' sequence and inner sequence
tagggaagagaaggacatatgatggcatgatcgaaccgctagtgtgtcaggga

SEQ ID NO: 41404 - DNA, 52 bp, Artificial Sequence
  Description of Artificial Sequence: Synthetic gluten; 5' sequence and inner sequence
tagggaagagaaggacatatgatggcatgcgatggatgtggctggtgcttgc

SEQ ID NO: 41405 - DNA, 53 bp, Artificial Sequence
  Description of Artificial Sequence: Synthetic gluten; 5' sequence and inner sequence
tagggaagagaaggacatatgatggcattcgatgcactacaagttgttgcgta

SEQ ID NO: 41406 - DNA, 53 bp, Artificial Sequence
  Description of Artificial Sequence: Synthetic gluten; 5' sequence and inner sequence
tagggaagagaaggacatatgatccgactcgacctgaatgtaataggagtgaa

SEQ ID NO: 41407 - DNA, 53 bp, Artificial Sequence
  Description of Artificial Sequence: Synthetic gluten; 5' sequence and inner sequence
tagggaagagaaggacatatgattggcacacaagcatatcgcacttatctgga

SEQ ID NO: 41408 - DNA, 53 bp, Artificial Sequence
  Description of Artificial Sequence: Synthetic gluten; 5' sequence and inner sequence
tagggaagagaaggacatatgatctgacctagcaactgtggcacgcaatttga

SEQ ID NO: 41409 - DNA, 53 bp, Artificial Sequence
  Description of Artificial Sequence: Synthetic gluten; 5' sequence and inner sequence
tagggaagagaaggacatatgatcatgtacccacgatagtcctgaggagcata

SEQ ID NO: 41410 - DNA, 53 bp, Artificial Sequence
  Description of Artificial Sequence: Synthetic gluten; 5' sequence and inner sequence
tagggaagagaaggacatatgatcatatggacgccgatgaactagtacgggca

SEQ ID NO: 41411 - DNA, 53 bp, Artificial Sequence
  Description of Artificial Sequence: Synthetic gluten; 5' sequence and inner sequence
tagggaagagaaggacatatgatgtacgacactgcaccttcaagtgtgatgta

SEQ ID NO: 41412 - DNA, 53 bp, Artificial Sequence; identical to SEQ ID NO: 5598
  Description of Artificial Sequence: Synthetic gluten; 5' sequence and inner sequence

SEQ ID NO: 41413 - DNA, 53 bp, Artificial Sequence; identical to SEQ ID NO: 5555
  Description of Artificial Sequence: Synthetic gluten; 5' sequence and inner sequence

SEQ ID NO: 41414 - DNA, 53 bp, Artificial Sequence
  Description of Artificial Sequence: Synthetic gluten; 5' sequence and inner sequence
tagggaagagaaggacatatgatgacctgatcgaacctagagagtggcgtgga

SEQ ID NO: 41415 - DNA, 53 bp, Artificial Sequence
  Description of Artificial Sequence: Synthetic gluten; 5' sequence and inner sequence
tagggaagagaaggacatatgatggacgaactgaactaaagtggggtacgacg

SEQ ID NO: 41416 - DNA, 53 bp, Artificial Sequence
  Description of Artificial Sequence: Synthetic gluten; 5' sequence and inner sequence
tagggaagagaaggacatatgatcctgagctgcactaggacggcaattccaaa

SEQ ID NO: 41417 - DNA, 53 bp, Artificial Sequence
  Description of Artificial Sequence: Synthetic gluten; 5' sequence and inner sequence
tagggaagagaaggacatatgatcatgtacgctcataaaggctcgcactcata

SEQ ID NO: 41418 - DNA, 53 bp, Artificial Sequence
  Description of Artificial Sequence: Synthetic gluten; 5' sequence and inner sequence
tagggaagagaaggacatatgatccgtacgattcgctgcaatgtgctcatgga

SEQ ID NO: 41419 - DNA, 53 bp, Artificial Sequence; identical to SEQ ID NO: 1112
  Description of Artificial Sequence: Synthetic gluten; 5' sequence and inner sequence

SEQ ID NO: 41420 - DNA, 52 bp, Artificial Sequence
  Description of Artificial Sequence: Synthetic gluten; 5' sequence and inner sequence
tagggaagagaaggacatatgatttcgcagaaagcacgtgatcaacgcgcac

SEQ ID NO: 41421 - DNA, 53 bp, Artificial Sequence
  Description of Artificial Sequence: Synthetic gluten; 5' sequence and inner sequence
tagggaagagaaggacatatgatcgaccctgttgagagccgaagatctgcaat

SEQ ID NO: 41422 - DNA, 53 bp, Artificial Sequence
  Description of Artificial Sequence: Synthetic gluten; 5' sequence and inner sequence
tagggaagagaaggacatatgatgcacgacgatgactgaaagtgtccatgtgc

SEQ ID NO: 41423 - DNA, 53 bp, Artificial Sequence
  Description of Artificial Sequence: Synthetic gluten; 5' sequence and inner sequence
tagggaagagaaggacatatgattcatatggccaatgacgccctgtacgtgtc

SEQ ID NO: 41424 - DNA, 53 bp, Artificial Sequence
  Description of Artificial Sequence: Synthetic gluten; 5' sequence and inner sequence
tagggaagagaaggacatatgatggcctgaacgcgcctatcaatgcgtctgta

SEQ ID NO: 41425 - DNA, 53 bp, Artificial Sequence
  Description of Artificial Sequence: Synthetic gluten; 5' sequence and inner sequence
tagggaagagaaggacatatgattgaagtgacacaagagccgaagatacagta

SEQ ID NO: 41426 - DNA, 53 bp, Artificial Sequence
  Description of Artificial Sequence: Synthetic gluten; 5' sequence and inner sequence
tagggaagagaaggacatatgatgtactgctctggcacgaagatgctgcgtca

SEQ ID NO: 41427 - DNA, 53 bp, Artificial Sequence
  Description of Artificial Sequence: Synthetic gluten; 5' sequence and inner sequence
tagggaagagaaggacatatgatgtgctgcgatgaccgatgaaggcactaggc

SEQ ID NO: 41428 - DNA, 53 bp, Artificial Sequence
  Description of Artificial Sequence: Synthetic gluten; 5' sequence and inner sequence
tagggaagagaaggacatatgatggccaccctcatcccttgggcatgcacgac

SEQ ID NO: 41429 - DNA, 53 bp, Artificial Sequence
  Description of Artificial Sequence: Synthetic gluten; 5' sequence and inner sequence
tagggaagagaaggacatatgatgactgaacggaaacaagtggaagtggcgtc

SEQ ID NO: 41430 - DNA, 53 bp, Artificial Sequence
  Description of Artificial Sequence: Synthetic gluten; 5' sequence and inner sequence
tagggaagagaaggacatatgatcgtcatgccatagaaatcgtggaccgtgcc

SEQ ID NO: 41431 - DNA, 53 bp, Artificial Sequence
  Description of Artificial Sequence: Synthetic gluten; 5' sequence and inner sequence
tagggaagagaaggacatatgatgtcatgccgtcccgtacaagtcgtcaggga

SEQ ID NO: 41432 - DNA, 53 bp, Artificial Sequence
  Description of Artificial Sequence: Synthetic gluten; 5' sequence and inner sequence
tagggaagagaaggacatatgattggactcgctgaacctaccaagaacatgtc

SEQ ID NO: 41433 - DNA, 53 bp, Artificial Sequence
  Description of Artificial Sequence: Synthetic gluten; 5' sequence and inner sequence
tagggaagagaaggacatatgattgtccgaagcaaccggcaatggacgacgtc

SEQ ID NO: 41434 - DNA, 53 bp, Artificial Sequence
  Description of Artificial Sequence: Synthetic gluten; 5' sequence and inner sequence
tagggaagagaaggacatatgatgtacgacgcggaccttcaagtaggcgtgga

SEQ ID NO: 41435 - DNA, 54 bp, Artificial Sequence
  Description of Artificial Sequence: Synthetic gluten; 5' sequence and inner sequence
tagggaagagaaggacatatgatgtacgacgcggacctgtcatggatgggcaca

SEQ ID NO: 41436 - DNA, 53 bp, Artificial Sequence
  Description of Artificial Sequence: Synthetic gluten; 5' sequence and inner sequence
tagggaagagaaggacatatgatgtcatgctcggatgtgggctttacggtcca

SEQ ID NO: 41437 - DNA, 53 bp, Artificial Sequence
  Description of Artificial Sequence: Synthetic gluten; 5' sequence and inner sequence
tagggaagagaaggacatatgatatcatcaggtggacgaatcggaacgtggga

SEQ ID NO: 41438 - DNA, 52 bp, Artificial Sequence
  Description of Artificial Sequence: Synthetic gluten; 5' sequence and inner sequence
tagggaagagaaggacatatgatgtacgcagctgacctcaagtgctcgtggc

SEQ ID NO: 41439 - DNA, 53 bp, Artificial Sequence
  Description of Artificial Sequence: Synthetic gluten; 5' sequence and inner sequence
tagggaagagaaggacatatgatggcccgagctggatgtggcttgaacgtgtc

SEQ ID NO: 41440 - DNA, 53 bp, Artificial Sequence
  Description of Artificial Sequence: Synthetic gluten; 5' sequence and inner sequence
tagggaagagaaggacatatgattcatgtccgtcacgcagcatcaagtgcgaa

SEQ ID NO: 41441 - DNA, 53 bp, Artificial Sequence
  Description of Artificial Sequence: Synthetic gluten; 5' sequence and inner sequence
tagggaagagaaggacatatgatcctgcgaagccctgtagaccatgcacgtgc

SEQ ID NO: 41442 - DNA, 53 bp, Artificial Sequence
  Description of Artificial Sequence: Synthetic gluten; 5' sequence and inner sequence
tagggaagagaaggacatatgatcaacatagctgccgaacggaatgactcacg

SEQ ID NO: 41443 - DNA, 53 bp, Artificial Sequence; identical to SEQ ID NO: 5801
  Description of Artificial Sequence: Synthetic gluten; 5' sequence and inner sequence

SEQ ID NO: 41444 - DNA, 53 bp, Artificial Sequence
  Description of Artificial Sequence: Synthetic gluten; 5' sequence and inner sequence
tagggaagagaaggacatatgatggcctgagctgaccgaatgtgcgcgctgtc

SEQ ID NO: 41445 - DNA, 53 bp, Artificial Sequence
  Description of Artificial Sequence: Synthetic gluten; 5' sequence and inner sequence
tagggaagagaaggacatatgattggccgagcgaaccgaagtactgtcagaca

SEQ ID NO: 41446 - DNA, 53 bp, Artificial Sequence; identical to SEQ ID NO: 29922
  Description of Artificial Sequence: Synthetic gluten; 5' sequence and inner sequence

SEQ ID NO: 41447 - DNA, 53 bp, Artificial Sequence
  Description of Artificial Sequence: Synthetic gluten; 5' sequence and inner sequence
tagggaagagaaggacatatgatcatgtacagatcgaagcgaatctcggcata

SEQ ID NO: 41448 - DNA, 53 bp, Artificial Sequence
  Description of Artificial Sequence: Synthetic gluten; 5' sequence and inner sequence
tagggaagagaaggacatatgatacagatgcacgacgacttccctaattggca

SEQ ID NO: 41449 - DNA, 53 bp, Artificial Sequence
  Description of Artificial Sequence: Synthetic gluten; 5' sequence and inner sequence
tagggaagagaaggacatatgatgcaccacgtgctagcaatggaccgactgga

SEQ ID NO: 41450 - DNA, 53 bp, Artificial Sequence
  Description of Artificial Sequence: Synthetic gluten; 5' sequence and inner sequence
tagggaagagaaggacatatgataatgtgcccggatcggaacgtggccatgta

SEQ ID NO: 41451 - DNA, 53 bp, Artificial Sequence
  Description of Artificial Sequence: Synthetic gluten; 5' sequence and inner sequence
tagggaagagaaggacatatgatcaactcacgtgcctcggcttgctcatttag

SEQ ID NO: 41452 - DNA, 52 bp, Artificial Sequence
  Description of Artificial Sequence: Synthetic gluten; 5' sequence and inner sequence
tagggaagagaaggacatatgatggccgagcttcccttaagatcaggcacac

SEQ ID NO: 41453 - DNA, 53 bp, Artificial Sequence
  Description of Artificial Sequence: Synthetic gluten; 5' sequence and inner sequence
tagggaagagaaggacatatgatcctgcgatgactaacggaataggcaacatg

SEQ ID NO: 41454 - DNA, 53 bp, Artificial Sequence
  Description of Artificial Sequence: Synthetic gluten; 5' sequence and inner sequence
tagggaagagaaggacatatgatagaaccagcctgaaggagcgagtgtacgag

SEQ ID NO: 41455 - DNA, 53 bp, Artificial Sequence
  Description of Artificial Sequence: Synthetic gluten; 5' sequence and inner sequence
tagggaagagaaggacatatgatcatgatcgcaccgaatagatcaggtacgta

SEQ ID NO: 41456 - DNA, 53 bp, Artificial Sequence
  Description of Artificial Sequence: Synthetic gluten; 5' sequence and inner sequence
tagggaagagaaggacatatgatcgcaacgcagaaacgtataagggtggatcg

SEQ ID NO: 41457 - DNA, 53 bp, Artificial Sequence
  Description of Artificial Sequence: Synthetic gluten; 5' sequence and inner sequence
tagggaagagaaggacatatgatcatggcggatacagctggaagacaggcata

SEQ ID NO: 41458 - DNA, 53 bp, Artificial Sequence
  Description of Artificial Sequence: Synthetic gluten; 5' sequence and inner sequence
tagggaagagaaggacatatgatcggaacgagcatatcaaacacgtggtggtt

SEQ ID NO: 41459 - DNA, 53 bp, Artificial Sequence
  Description of Artificial Sequence: Synthetic gluten; 5' sequence and inner sequence
tagggaagagaaggacatatgatcctgctcggacctatcatggacggcattca

SEQ ID NO: 41460 - DNA, 53 bp, Artificial Sequence
  Description of Artificial Sequence: Synthetic gluten; 5' sequence and inner sequence
tagggaagagaaggacatatgatcatggacgtaactaagcaaacttggccata

SEQ ID NO: 41461 - DNA, 53 bp, Artificial Sequence
  Description of Artificial Sequence: Synthetic gluten; 5' sequence and inner sequence
tagggaagagaaggacatatgatgtcaagagcgacccttcatgaggacatgga

SEQ ID NO: 41462 - DNA, 53 bp, Artificial Sequence
  Description of Artificial Sequence: Synthetic gluten; 5' sequence and inner sequence
tagggaagagaaggacatatgatcatgtacgaaacaaggactgggtctcatta

SEQ ID NO: 41463 - DNA, 53 bp, Artificial Sequence
  Description of Artificial Sequence: Synthetic gluten; 5' sequence and inner sequence
tagggaagagaaggacatatgatgtccatagcttgccttcaagggagcgtgga

SEQ ID NO: 41464 - DNA, 53 bp, Artificial Sequence
  Description of Artificial Sequence: Synthetic gluten; 5' sequence and inner sequence
tagggaagagaaggacatatgataggatgcacgaacttccctacatgtggaca

SEQ ID NO: 41465 - DNA, 53 bp, Artificial Sequence; identical to SEQ ID NO: 1201
  Description of Artificial Sequence: Synthetic gluten; 5' sequence and inner sequence

SEQ ID NO: 41466 - DNA, 53 bp, Artificial Sequence
  Description of Artificial Sequence: Synthetic gluten; 5' sequence and inner sequence
tagggaagagaaggacatatgatcatgtcgttagaaagcatcccaatgtcata

SEQ ID NO: 41467 - DNA, 53 bp, Artificial Sequence
  Description of Artificial Sequence: Synthetic gluten; 5' sequence and inner sequence
tagggaagagaaggacatatgatcatgtgcgattcgacgtgcatccgttcata

SEQ ID NO: 41468 - DNA, 53 bp, Artificial Sequence; identical to SEQ ID NO: 1161
  Description of Artificial Sequence: Synthetic gluten; 5' sequence and inner sequence

SEQ ID NO: 41469 - DNA, 53 bp, Artificial Sequence
  Description of Artificial Sequence: Synthetic gluten; 5' sequence and inner sequence
tagggaagagaaggacatatgatggccgaatcgaacctaggacatgtcgcgta

SEQ ID NO: 41470 - DNA, 53 bp, Artificial Sequence; identical to SEQ ID NO: 1472
  Description of Artificial Sequence: Synthetic gluten; 5' sequence and inner sequence

SEQ ID NO: 41471 - DNA, 53 bp, Artificial Sequence; identical to SEQ ID NO: 29472
  Description of Artificial Sequence: Synthetic gluten; 5' sequence and inner sequence

SEQ ID NO: 41472 - DNA, 53 bp, Artificial Sequence
  Description of Artificial Sequence: Synthetic gluten; 5' sequence and inner sequence
tagggaagagaaggacatatgatcttcccacaagctggtaggggacgaggcca

SEQ ID NO: 41473 - DNA, 52 bp, Artificial Sequence
  Description of Artificial Sequence: Synthetic gluten; 5' sequence and inner sequence
tagggaagagaaggacatatgatggcctgcgatggatgtggcatgctctggc

SEQ ID NO: 41474 - DNA, 53 bp, Artificial Sequence; identical to SEQ ID NO: 1106
  Description of Artificial Sequence: Synthetic gluten; 5' sequence and inner sequence

SEQ ID NO: 41475 - DNA, 53 bp, Artificial Sequence; identical to SEQ ID NO: 1245
  Description of Artificial Sequence: Synthetic gluten; 5' sequence and inner sequence

SEQ ID NO: 41476 - DNA, 53 bp, Artificial Sequence
  Description of Artificial Sequence: Synthetic gluten; 5' sequence and inner sequence
tagggaagagaaggacatatgatgcatatgcactgcgcgaccctcaagtgaca

SEQ ID NO: 41477 - DNA, 53 bp, Artificial Sequence
  Description of Artificial Sequence: Synthetic gluten; 5' sequence and inner sequence
tagggaagagaaggacatatgatggcatgagctgcctacaagatggggatgta

SEQ ID NO: 41478 - DNA, 53 bp, Artificial Sequence; identical to SEQ ID NO: 1046
  Description of Artificial Sequence: Synthetic gluten; 5' sequence and inner sequence

SEQ ID NO: 41479 - DNA, 53 bp, Artificial Sequence
  Description of Artificial Sequence: Synthetic gluten; 5' sequence and inner sequence
tagggaagagaaggacatatgatacgtatcgaacctagcgagtgtgtcgtgga

SEQ ID NO: 41480 - DNA, 54 bp, Artificial Sequence
  Description of Artificial Sequence: Synthetic gluten; 5' sequence and inner sequence
tagggaagagaaggacatatgattgtactgagcggatgtggactgcacgtaggc

SEQ ID NO: 41481 - DNA, 53 bp, Artificial Sequence; identical to SEQ ID NO: 1321
  Description of Artificial Sequence: Synthetic gluten; 5' sequence and inner sequence

SEQ ID NO: 41482 - DNA, 53 bp, Artificial Sequence; identical to SEQ ID NO: 1186
  Description of Artificial Sequence: Synthetic gluten; 5' sequence and inner sequence

SEQ ID NO: 41483 - DNA, 53 bp, Artificial Sequence; identical to SEQ ID NO: 37643
  Description of Artificial Sequence: Synthetic gluten; 5' sequence and inner sequence

SEQ ID NO: 41484 - DNA, 53 bp, Artificial Sequence; identical to SEQ ID NO: 1401
  Description of Artificial Sequence: Synthetic gluten; 5' sequence and inner sequence

SEQ ID NO: 41485 - DNA, 53 bp, Artificial Sequence
  Description of Artificial Sequence: Synthetic gluten; 5' sequence and inner sequence
tagggaagagaaggacatatgatgctccgaacgacccttgtagtgtcaatcca

SEQ ID NO: 41486 - DNA, 53 bp, Artificial Sequence; identical to SEQ ID NO: 1611
  Description of Artificial Sequence: Synthetic gluten; 5' sequence and inner sequence

SEQ ID NO: 41487 - DNA, 53 bp, Artificial Sequence
  Description of Artificial Sequence: Synthetic gluten; 5' sequence and inner sequence
tagggaagagaaggacatatgattggccgatcgaccctatcaagagcagcatg

SEQ ID NO: 41488 - DNA, 53 bp, Artificial Sequence
  Description of Artificial Sequence: Synthetic gluten; 5' sequence and inner sequence
tagggaagagaaggacatatgatgtcatatggccgaagcgagaacagctatgt

SEQ ID NO: 41489 - DNA, 53 bp, Artificial Sequence
  Description of Artificial Sequence: Synthetic gluten; 5' sequence and inner sequence
tagggaagagaaggacatatgattcatcataggaacgagctgacctcggcatg

SEQ ID NO: 41490 - DNA, 53 bp, Artificial Sequence; identical to SEQ ID NO: 1359
  Description of Artificial Sequence: Synthetic gluten; 5' sequence and inner sequence

SEQ ID NO: 41491 - DNA, 53 bp, Artificial Sequence; identical to SEQ ID NO: 1698
  Description of Artificial Sequence: Synthetic gluten; 5' sequence and inner sequence

SEQ ID NO: 41492 - DNA, 51 bp, Artificial Sequence
  Description of Artificial Sequence: Synthetic gluten; 5' sequence and inner sequence
tagggaagagaaggacatatgatccgagagagccgaagaaccaggcaatga

SEQ ID NO: 41493 - DNA, 53 bp, Artificial Sequence; identical to SEQ ID NO: 1301
  Description of Artificial Sequence: Synthetic gluten; 5' sequence and inner sequence

SEQ ID NO: 41494 - DNA, 53 bp, Artificial Sequence
  Description of Artificial Sequence: Synthetic gluten; 5' sequence and inner sequence
tagggaagagaaggacatatgatcatgtaacgataggcaacaatgttgtcata

SEQ ID NO: 41495 - DNA, 53 bp, Artificial Sequence
  Description of Artificial Sequence: Synthetic gluten; 5' sequence and inner sequence
tagggaagagaaggacatatgatacgatcgaacctatcatgacgcgggctata

SEQ ID NO: 41496 - DNA, 53 bp, Artificial Sequence
  Description of Artificial Sequence: Synthetic gluten; 5' sequence and inner sequence
tagggaagagaaggacatatgatggcatgcgctgggtagtgatcacgtacgga

SEQ ID NO: 41497 - DNA, 53 bp, Artificial Sequence
  Description of Artificial Sequence: Synthetic gluten; 5' sequence and inner sequence
tagggaagagaaggacatatgattggcatgcgagtcactagtctgtactggcc

SEQ ID NO: 41498 - DNA, 53 bp, Artificial Sequence
  Description of Artificial Sequence: Synthetic gluten; 5' sequence and inner sequence
tagggaagagaaggacatatgatccgaacgaacctgtcgatcgaagcttcgca

SEQ ID NO: 41499 - DNA, 53 bp, Artificial Sequence; identical to SEQ ID NO: 29497
  Description of Artificial Sequence: Synthetic gluten; 5' sequence and inner sequence

SEQ ID NO: 41500 - DNA, 53 bp, Artificial Sequence
  Description of Artificial Sequence: Synthetic gluten; 5' sequence and inner sequence
tagggaagagaaggacatatgatggccacacgattccctcaagtcgttatgta

SEQ ID NO: 41501 - DNA, 53 bp, Artificial Sequence
  Description of Artificial Sequence: Synthetic gluten; 5' sequence and inner sequence
tagggaagagaaggacatatgatctccgcgaagtacctcaacaaacgttcggc

SEQ ID NO: 41502 - DNA, 53 bp, Artificial Sequence
  Description of Artificial Sequence: Synthetic gluten; 5' sequence and inner sequence
tagggaagagaaggacatatgatcgtaccagagccgacgattctgtcaatgta

SEQ ID NO: 41503 - DNA, 53 bp, Artificial Sequence; identical to SEQ ID NO: 1109
  Description of Artificial Sequence: Synthetic gluten; 5' sequence and inner sequence

SEQ ID NO: 41504 - DNA, 53 bp, Artificial Sequence; identical to SEQ ID NO: 37861
  Description of Artificial Sequence: Synthetic gluten; 5' sequence and inner sequence

SEQ ID NO: 41505 - DNA, 53 bp, Artificial Sequence
  Description of Artificial Sequence: Synthetic gluten; 5' sequence and inner sequence
tagggaagagaaggacatatgatggacgacgcgacctacgagtgagacatgga

SEQ ID NO: 41506 - DNA, 53 bp, Artificial Sequence
  Description of Artificial Sequence: Synthetic gluten; 5' sequence and inner sequence
tagggaagagaaggacatatgatggacgacgcggaccttcaagtaggcgtgta

SEQ ID NO: 41507 - DNA, 53 bp, Artificial Sequence
  Description of Artificial Sequence: Synthetic gluten; 5' sequence and inner sequence
tagggaagagaaggacatatgatcacggtgcgaagctatgtctcatcaacgca

SEQ ID NO: 41508 - DNA, 53 bp, Artificial Sequence
  Description of Artificial Sequence: Synthetic gluten; 5' sequence and inner sequence
tagggaagagaaggacatatgatgtcaatcacatgttctttagagccctcgtg

SEQ ID NO: 41509 - DNA, 53 bp, Artificial Sequence
  Description of Artificial Sequence: Synthetic gluten; 5' sequence and inner sequence
tagggaagagaaggacatatgatgtactgcctggatgttgacatgcacttgtc

SEQ ID NO: 41510 - DNA, 53 bp, Artificial Sequence; identical to SEQ ID NO: 5884
  Description of Artificial Sequence: Synthetic gluten; 5' sequence and inner sequence

SEQ ID NO: 41511 - DNA, 53 bp, Artificial Sequence
  Description of Artificial Sequence: Synthetic gluten; 5' sequence and inner sequence
tagggaagagaaggacatatgatgtcactctcaagctatcaagtgcgaaggta

SEQ ID NO: 41512 - DNA, 53 bp, Artificial Sequence
  Description of Artificial Sequence: Synthetic gluten; 5' sequence and inner sequence
tagggaagagaaggacatatgatcatgtccggaacgaccacttgagcgtgtca

SEQ ID NO: 41513 - DNA, 53 bp, Artificial Sequence
  Description of Artificial Sequence: Synthetic gluten; 5' sequence and inner sequence
tagggaagagaaggacatatgattggcatgcgatcccctgacagtacttgagc

SEQ ID NO: 41514 - DNA, 53 bp, Artificial Sequence
  Description of Artificial Sequence: Synthetic gluten; 5' sequence and inner sequence
tagggaagagaaggacatatgatggcatgcgacttcccttagatccgtacagc

SEQ ID NO: 41515 - DNA, 53 bp, Artificial Sequence
  Description of Artificial Sequence: Synthetic gluten; 5' sequence and inner sequence
tagggaagagaaggacatatgatcctgagcgcaccctcgtcatgcagctagac

SEQ ID NO: 41516 - DNA, 53 bp, Artificial Sequence
  Description of Artificial Sequence: Synthetic gluten; 5' sequence and inner sequence
tagggaagagaaggacatatgatgcccaaacgaccttcaagatggatcgtgta

SEQ ID NO: 41517 - DNA, 53 bp, Artificial Sequence; identical to SEQ ID NO: 1312
  Description of Artificial Sequence: Synthetic gluten; 5' sequence and inner sequence

SEQ ID NO: 41518 - DNA, 53 bp, Artificial Sequence
  Description of Artificial Sequence: Synthetic gluten; 5' sequence and inner sequence
tagggaagagaaggacatatgatgtgccgaagttgcctacaagtgcgagtgta

SEQ ID NO: 41519 - DNA, 53 bp, Artificial Sequence
  Description of Artificial Sequence: Synthetic gluten; 5' sequence and inner sequence
tagggaagagaaggacatatgatcgtaccgcaagagacgtgtccgtgccgtga

SEQ ID NO: 41520 - DNA, 53 bp, Artificial Sequence
  Description of Artificial Sequence: Synthetic gluten; 5' sequence and inner sequence
tagggaagagaaggacatatgatatggcctgcgtatgaccgtcagagcatgga

SEQ ID NO: 41521 - DNA, 53 bp, Artificial Sequence
  Description of Artificial Sequence: Synthetic gluten; 5' sequence and inner sequence
tagggaagagaaggacatatgataatgcatcagtgtcaaatgcgttcaagatg

SEQ ID NO: 41522 - DNA, 54 bp, Artificial Sequence
  Description of Artificial Sequence: Synthetic gluten; 5' sequence and inner sequence
tagggaagagaaggacatatgatggcctgcgatggatgttgacatgcacttgtc

SEQ ID NO: 41523 - DNA, 53 bp, Artificial Sequence
  Description of Artificial Sequence: Synthetic gluten; 5' sequence and inner sequence
tagggaagagaaggacatatgatcattcgcgacctaaacgtgacatggacgga

SEQ ID NO: 41524 - DNA, 53 bp, Artificial Sequence
  Description of Artificial Sequence: Synthetic gluten; 5' sequence and inner sequence
tagggaagagaaggacatatgattgtacgtcgcgacctacatgtgctgcatca

SEQ ID NO: 41525 - DNA, 53 bp, Artificial Sequence
  Description of Artificial Sequence: Synthetic gluten; 5' sequence and inner sequence
tagggaagagaaggacatatgatgtgcgcgaaaacctatcacgtgatcatgga

SEQ ID NO: 41526 - DNA, 53 bp, Artificial Sequence
  Description of Artificial Sequence: Synthetic gluten; 5' sequence and inner sequence
tagggaagagaaggacatatgatatcacgcatagggacttcgatggcacgtca

SEQ ID NO: 41527 - DNA, 53 bp, Artificial Sequence
  Description of Artificial Sequence: Synthetic gluten; 5' sequence and inner sequence
tagggaagagaaggacatatgattgacgaacgcaacctatagaacatgtcgta

SEQ ID NO: 41528 - DNA, 53 bp, Artificial Sequence
  Description of Artificial Sequence: Synthetic gluten; 5' sequence and inner sequence
tagggaagagaaggacatatgatggacggatcgaacctacaagctgtcgtgga

SEQ ID NO: 41529 - DNA, 53 bp, Artificial Sequence; identical to SEQ ID NO: 1198
  Description of Artificial Sequence: Synthetic gluten; 5' sequence and inner sequence

SEQ ID NO: 41530 - DNA, 53 bp, Artificial Sequence; identical to SEQ ID NO: 1168
  Description of Artificial Sequence: Synthetic gluten; 5' sequence and inner sequence

SEQ ID NO: 41531 - DNA, 53 bp, Artificial Sequence
  Description of Artificial Sequence: Synthetic gluten; 5' sequence and inner sequence
tagggaagagaaggacatatgatcaaacgcagtgagcatatggcataagtggg

SEQ ID NO: 41532 - DNA, 53 bp, Artificial Sequence
  Description of Artificial Sequence: Synthetic gluten; 5' sequence and inner sequence
tagggaagagaaggacatatgatgtactgcgcgaccctaaagtgataggcatg

SEQ ID NO: 41533 - DNA, 52 bp, Artificial Sequence
  Description of Artificial Sequence: Synthetic gluten; 5' sequence and inner sequence
tagggaagagaaggacatatgatacgaatgagccgaagatacaatgtcagta

SEQ ID NO: 41534 - DNA, 52 bp, Artificial Sequence
  Description of Artificial Sequence: Synthetic gluten; 5' sequence and inner sequence
tagggaagagaaggacatatgattgagctagcgagaaccgaagatacaggga

SEQ ID NO: 41535 - DNA, 53 bp, Artificial Sequence
  Description of Artificial Sequence: Synthetic gluten; 5' sequence and inner sequence
tagggaagagaaggacatatgatgactgaacgaccgaaaggggacatgacgag

SEQ ID NO: 41536 - DNA, 53 bp, Artificial Sequence
  Description of Artificial Sequence: Synthetic gluten; 5' sequence and inner sequence
tagggaagagaaggacatatgattcatgtgtcacgaagccctacaagtcgtca

SEQ ID NO: 41537 - DNA, 53 bp, Artificial Sequence
  Description of Artificial Sequence: Synthetic gluten; 5' sequence and inner sequence
tagggaagagaaggacatatgatcctgagcgaacctgtcaacatcacggagca

SEQ ID NO: 41538 - DNA, 53 bp, Artificial Sequence; identical to SEQ ID NO: 1126
  Description of Artificial Sequence: Synthetic gluten; 5' sequence and inner sequence

SEQ ID NO: 41539 - DNA, 53 bp, Artificial Sequence
  Description of Artificial Sequence: Synthetic gluten; 5' sequence and inner sequence
tagggaagagaaggacatatgatcacgtcacagggccgacctctcatgaacta

SEQ ID NO: 41540 - DNA, 53 bp, Artificial Sequence
  Description of Artificial Sequence: Synthetic gluten; 5' sequence and inner sequence
tagggaagagaaggacatatgatcaatagagccgaagagcaatgtcaacgagt

SEQ ID NO: 41541 - DNA, 53 bp, Artificial Sequence
  Description of Artificial Sequence: Synthetic gluten; 5' sequence and inner sequence
tagggaagagaaggacatatgatcgcaacggaagtaaaatcagttccgaaacg

SEQ ID NO: 41542 - DNA, 53 bp, Artificial Sequence
  Description of Artificial Sequence: Synthetic gluten; 5' sequence and inner sequence
tagggaagagaaggacatatgatcggcagtcgtaaacgaatcggctaggcata

SEQ ID NO: 41543 - DNA, 53 bp, Artificial Sequence
  Description of Artificial Sequence: Synthetic gluten; 5' sequence and inner sequence
tagggaagagaaggacatatgattcactcgtgtccaacctcccttcgtggaca

SEQ ID NO: 41544 - DNA, 52 bp, Artificial Sequence
  Description of Artificial Sequence: Synthetic gluten; 5' sequence and inner sequence
tagggaagagaaggacatatgatatgatcctgcacgaccaaagttggccatg

SEQ ID NO: 41545 - DNA, 53 bp, Artificial Sequence
  Description of Artificial Sequence: Synthetic gluten; 5' sequence and inner sequence
tagggaagagaaggacatatgattgatcgcatggacgtcgatggatgtgggca

SEQ ID NO: 41546 - DNA, 53 bp, Artificial Sequence
  Description of Artificial Sequence: Synthetic gluten; 5' sequence and inner sequence
tagggaagagaaggacatatgatccgaacgaccgggaatgaacgtgtcagaaa

SEQ ID NO: 41547 - DNA, 53 bp, Artificial Sequence
  Description of Artificial Sequence: Synthetic gluten; 5' sequence and inner sequence
tagggaagagaaggacatatgatcatgtacggacgaggcattgcgtgctcata

SEQ ID NO: 41548 - DNA, 53 bp, Artificial Sequence
  Description of Artificial Sequence: Synthetic gluten; 5' sequence and inner sequence
tagggaagagaaggacatatgattgaccgatcgaccctatcaagtgcagcatg

SEQ ID NO: 41549 - DNA, 53 bp, Artificial Sequence
  Description of Artificial Sequence: Synthetic gluten; 5' sequence and inner sequence
tagggaagagaaggacatatgatccgatcgacctgaatgtgcgtggcaattga

SEQ ID NO: 41550 - DNA, 53 bp, Artificial Sequence
  Description of Artificial Sequence: Synthetic gluten; 5' sequence and inner sequence
tagggaagagaaggacatatgatgacgatgctgaccgtcaagggagtcacgta

SEQ ID NO: 41551 - DNA, 53 bp, Artificial Sequence
  Description of Artificial Sequence: Synthetic gluten; 5' sequence and inner sequence
tagggaagagaaggacatatgattgaacaagcataggacgacacgcagtcata

SEQ ID NO: 41552 - DNA, 53 bp, Artificial Sequence
  Description of Artificial Sequence: Synthetic gluten; 5' sequence and inner sequence
tagggaagagaaggacatatgatggactgcacgaccgatagagcatggactgt

SEQ ID NO: 41553 - DNA, 53 bp, Artificial Sequence
  Description of Artificial Sequence: Synthetic gluten; 5' sequence and inner sequence
tagggaagagaaggacatatgatcatccaccgatagcgaatatggcctggatc

SEQ ID NO: 41554 - DNA, 53 bp, Artificial Sequence; identical to SEQ ID NO: 13939
  Description of Artificial Sequence: Synthetic gluten; 5' sequence and inner sequence

SEQ ID NO: 41555 - DNA, 53 bp, Artificial Sequence
  Description of Artificial Sequence: Synthetic gluten; 5' sequence and inner sequence
tagggaagagaaggacatatgatatgtacggatcgaacgtggtagtgtgcgca

SEQ ID NO: 41556 - DNA, 53 bp, Artificial Sequence
  Description of Artificial Sequence: Synthetic gluten; 5' sequence and inner sequence
tagggaagagaaggacatatgatcgacacgctacctgtgatctggacttggca

SEQ ID NO: 41557 - DNA, 53 bp, Artificial Sequence
  Description of Artificial Sequence: Synthetic gluten; 5' sequence and inner sequence
tagggaagagaaggacatatgattgcaacggcaccgtagattccacaacagtg

SEQ ID NO: 41558 - DNA, 53 bp, Artificial Sequence
  Description of Artificial Sequence: Synthetic gluten; 5' sequence and inner sequence
tagggaagagaaggacatatgatctcagcgcaaagaccttcaatgcgatcggc

SEQ ID NO: 41559 - DNA, 54 bp, Artificial Sequence
  Description of Artificial Sequence: Synthetic gluten; 5' sequence and inner sequence
tagggaagagaaggacatatgattggcctgatcgaacctagagagtggcgtgga

SEQ ID NO: 41560 - DNA, 53 bp, Artificial Sequence
  Description of Artificial Sequence: Synthetic gluten; 5' sequence and inner sequence
tagggaagagaaggacatatgatcgacacgatggccttactgtgagcgggtca

SEQ ID NO: 41561 - DNA, 53 bp, Artificial Sequence
  Description of Artificial Sequence: Synthetic gluten; 5' sequence and inner sequence
tagggaagagaaggacatatgatggcctgatcgaacctagagcgtggcgtgga

SEQ ID NO: 41562 - DNA, 53 bp, Artificial Sequence
  Description of Artificial Sequence: Synthetic gluten; 5' sequence and inner sequence
tagggaagagaaggacatatgatcgaaacgccgtaaaagagctcatgtgggtt

SEQ ID NO: 41563 - DNA, 53 bp, Artificial Sequence
  Description of Artificial Sequence: Synthetic gluten; 5' sequence and inner sequence
tagggaagagaaggacatatgatgaacgcatgtcgtccctacacgtgatcatg

SEQ ID NO: 41564 - DNA, 53 bp, Artificial Sequence
  Description of Artificial Sequence: Synthetic gluten; 5' sequence and inner sequence
tagggaagagaaggacatatgatggacaacgatgaacggaagggcgtcgggta

SEQ ID NO: 41565 - DNA, 53 bp, Artificial Sequence; identical to SEQ ID NO: 1479
  Description of Artificial Sequence: Synthetic gluten; 5' sequence and inner sequence

SEQ ID NO: 41566 - DNA, 53 bp, Artificial Sequence
  Description of Artificial Sequence: Synthetic gluten; 5' sequence and inner sequence
tagggaagagaaggacatatgattcggcacgaaactttagagccctaacggtg

SEQ ID NO: 41567 - DNA, 53 bp, Artificial Sequence
  Description of Artificial Sequence: Synthetic gluten; 5' sequence and inner sequence
tagggaagagaaggacatatgatggccgatcgaccgaaagaacgaacgacgtg

SEQ ID NO: 41568 - DNA, 53 bp, Artificial Sequence
  Description of Artificial Sequence: Synthetic gluten; 5' sequence and inner sequence
tagggaagagaaggacatatgattggccgatcgaccctatcaagcgcagcatg

SEQ ID NO: 41569 - DNA, 52 bp, Artificial Sequence
  Description of Artificial Sequence: Synthetic gluten; 5' sequence and inner sequence
tagggaagagaaggacatatgatgacgacgcgaacctatcaagttgcatgga

SEQ ID NO: 41570 - DNA, 53 bp, Artificial Sequence; identical to SEQ ID NO: 1827
  Description of Artificial Sequence: Synthetic gluten; 5' sequence and inner sequence

SEQ ID NO: 41571 - DNA, 53 bp, Artificial Sequence; identical to SEQ ID NO: 1136
  Description of Artificial Sequence: Synthetic gluten; 5' sequence and inner sequence

SEQ ID NO: 41572 - DNA, 53 bp, Artificial Sequence
  Description of Artificial Sequence: Synthetic gluten; 5' sequence and inner sequence
tagggaagagaaggacatatgatggacagaacggacctatcatgtgacaggta

SEQ ID NO: 41573 - DNA, 53 bp, Artificial Sequence
  Description of Artificial Sequence: Synthetic gluten; 5' sequence and inner sequence
tagggaagagaaggacatatgatatggccggatcggaccgtgagtgctagtca

SEQ ID NO: 41574 - DNA, 53 bp, Artificial Sequence
  Description of Artificial Sequence: Synthetic gluten; 5' sequence and inner sequence
tagggaagagaaggacatatgatcctaaacgcacccttcaagttggcatcgta

SEQ ID NO: 41575 - DNA, 53 bp, Artificial Sequence
  Description of Artificial Sequence: Synthetic gluten; 5' sequence and inner sequence
tagggaagagaaggacatatgatggcctgatcgaacctagagagtggcgttga

SEQ ID NO: 41576 - DNA, 53 bp, Artificial Sequence
  Description of Artificial Sequence: Synthetic gluten; 5' sequence and inner sequence
tagggaagagaaggacatatgatactcgtatggccgattgacctcaatgggca

SEQ ID NO: 41577 - DNA, 53 bp, Artificial Sequence
  Description of Artificial Sequence: Synthetic gluten; 5' sequence and inner sequence
tagggaagagaaggacatatgatgcactgcgatgacctaagatctaggcagca

SEQ ID NO: 41578 - DNA, 53 bp, Artificial Sequence; identical to SEQ ID NO: 13744
  Description of Artificial Sequence: Synthetic gluten; 5' sequence and inner sequence

SEQ ID NO: 41579 - DNA, 53 bp, Artificial Sequence
  Description of Artificial Sequence: Synthetic gluten; 5' sequence and inner sequence
tagggaagagaaggacatatgatgccttccgaacccttcatgtgatcgtggac

SEQ ID NO: 41580 - DNA, 53 bp, Artificial Sequence
  Description of Artificial Sequence: Synthetic gluten; 5' sequence and inner sequence
tagggaagagaaggacatatgatcaattggcctgaacgaaccttggtgcggct

SEQ ID NO: 41581 - DNA, 53 bp, Artificial Sequence
  Description of Artificial Sequence: Synthetic gluten; 5' sequence and inner sequence
tagggaagagaaggacatatgatgaccgcacgatgaccatttcaacgtggcca

SEQ ID NO: 41582 - DNA, 53 bp, Artificial Sequence
  Description of Artificial Sequence: Synthetic gluten; 5' sequence and inner sequence
tagggaagagaaggacatatgatggcctaacgtaccttcaagtcaggagtgta

SEQ ID NO: 41583 - DNA, 48 bp, Artificial Sequence
  Description of Artificial Sequence: Synthetic gluten; 5' sequence and inner sequence
tagggaagagaaggacatatgatcgtaccggcatgctctaggcaacca

SEQ ID NO: 41584 - DNA, 53 bp, Artificial Sequence
  Description of Artificial Sequence: Synthetic gluten; 5' sequence and inner sequence
tagggaagagaaggacatatgatacggtcacgaccacttgccaaatgttagct

SEQ ID NO: 41585 - DNA, 53 bp, Artificial Sequence
  Description of Artificial Sequence: Synthetic gluten; 5' sequence and inner sequence
tagggaagagaaggacatatgattgcccaaacgaaccttagagcatggccgta

SEQ ID NO: 41586 - DNA, 53 bp, Artificial Sequence; identical to SEQ ID NO: 37677
  Description of Artificial Sequence: Synthetic gluten; 5' sequence and inner sequence

SEQ ID NO: 41587 - DNA, 53 bp, Artificial Sequence
  Description of Artificial Sequence: Synthetic gluten; 5' sequence and inner sequence
tagggaagagaaggacatatgattcagtccgacctgaactatctgggcacgca

SEQ ID NO: 41588 - DNA, 53 bp, Artificial Sequence
  Description of Artificial Sequence: Synthetic gluten; 5' sequence and inner sequence
tagggaagagaaggacatatgatcatgtacgaacgcgacattcatgttcatta

SEQ ID NO: 41589 - DNA, 53 bp, Artificial Sequence
  Description of Artificial Sequence: Synthetic gluten; 5' sequence and inner sequence
tagggaagagaaggacatatgattggcccgagcgaaccgatcacagtgaggca

SEQ ID NO: 41590 - DNA, 53 bp, Artificial Sequence
  Description of Artificial Sequence: Synthetic gluten; 5' sequence and inner sequence
tagggaagagaaggacatatgattaacatgtcacagtgggccttgctcgaacc

SEQ ID NO: 41591 - DNA, 53 bp, Artificial Sequence
  Description of Artificial Sequence: Synthetic gluten; 5' sequence and inner sequence
tagggaagagaaggacatatgatggccagagcgtaccttcatgtataggcaaa

SEQ ID NO: 41592 - DNA, 51 bp, Artificial Sequence
  Description of Artificial Sequence: Synthetic gluten; 5' sequence and inner sequence
tagggaagagaaggacatatgatggccgacacccctatcaagctggacatg

SEQ ID NO: 41593 - DNA, 53 bp, Artificial Sequence
  Description of Artificial Sequence: Synthetic gluten; 5' sequence and inner sequence
tagggaagagaaggacatatgatggccgaatcggaactagcaagcggtatgta

SEQ ID NO: 41594 - DNA, 53 bp, Artificial Sequence
  Description of Artificial Sequence: Synthetic gluten; 5' sequence and inner sequence
tagggaagagaaggacatatgatggcctgcgatgaccgctcaagtgccaggca

SEQ ID NO: 41595 - DNA, 53 bp, Artificial Sequence; identical to SEQ ID NO: 37642
  Description of Artificial Sequence: Synthetic gluten; 5' sequence and inner sequence

SEQ ID NO: 41596 - DNA, 53 bp, Artificial Sequence
  Description of Artificial Sequence: Synthetic gluten; 5' sequence and inner sequence
tagggaagagaaggacatatgatggcctgcgatggatgaggcgctgcactagt

SEQ ID NO: 41597 - DNA, 53 bp, Artificial Sequence
  Description of Artificial Sequence: Synthetic gluten; 5' sequence and inner sequence
tagggaagagaaggacatatgatactgatcgaaccgtcgaagtcagtttcaca

SEQ ID NO: 41598 - DNA, 53 bp, Artificial Sequence
  Description of Artificial Sequence: Synthetic gluten; 5' sequence and inner sequence
tagggaagagaaggacatatgatggacggagcgaaccaagtacaggcagctta

SEQ ID NO: 41599 - DNA, 53 bp, Artificial Sequence
  Description of Artificial Sequence: Synthetic gluten; 5' sequence and inner sequence
tagggaagagaaggacatatgatcatgtctaacagaaggccactcggctcata

SEQ ID NO: 41600 - DNA, 53 bp, Artificial Sequence; identical to SEQ ID NO: 29928
  Description of Artificial Sequence: Synthetic gluten; 5' sequence and inner sequence

SEQ ID NO: 41601 - DNA, 53 bp, Artificial Sequence
  Description of Artificial Sequence: Synthetic gluten; 5' sequence and inner sequence
tagggaagagaaggacatatgatccgagacaagctacatcagacaattgctaa

SEQ ID NO: 41602 - DNA, 53 bp, Artificial Sequence
  Description of Artificial Sequence: Synthetic gluten; 5' sequence and inner sequence
tagggaagagaaggacatatgatgtactgatcggaacatggcgactgtcaacg

SEQ ID NO: 41603 - DNA, 53 bp, Artificial Sequence
  Description of Artificial Sequence: Synthetic gluten; 5' sequence and inner sequence
tagggaagagaaggacatatgatggccgacgcgcactgttcatgcactacgtc

SEQ ID NO: 41604 - DNA, 53 bp, Artificial Sequence
  Description of Artificial Sequence: Synthetic gluten; 5' sequence and inner sequence
tagggaagagaaggacatatgatcatgcactggaacgagtgggaaccagcata

SEQ ID NO: 41605 - DNA, 53 bp, Artificial Sequence
  Description of Artificial Sequence: Synthetic gluten; 5' sequence and inner sequence
tagggaagagaaggacatatgatcgtaccgcaagtgacgtgtccgcgccgtga

SEQ ID NO: 41606 - DNA, 53 bp, Artificial Sequence
  Description of Artificial Sequence: Synthetic gluten; 5' sequence and inner sequence
tagggaagagaaggacatatgattggaggacgcagtaaataacgagctcgtgg

SEQ ID NO: 41607 - DNA, 53 bp, Artificial Sequence
  Description of Artificial Sequence: Synthetic gluten; 5' sequence and inner sequence
tagggaagagaaggacatatgatggccgaagcgaacactagtcagagcatgta

SEQ ID NO: 41608 - DNA, 53 bp, Artificial Sequence
  Description of Artificial Sequence: Synthetic gluten; 5' sequence and inner sequence
tagggaagagaaggacatatgatggacctgagctgcacgatcaaggcggaatg

SEQ ID NO: 41609 - DNA, 53 bp, Artificial Sequence
  Description of Artificial Sequence: Synthetic gluten; 5' sequence and inner sequence
tagggaagagaaggacatatgatgatgtcctgcgatgacctaaagcgtacgtg

SEQ ID NO: 41610 - DNA, 53 bp, Artificial Sequence; identical to SEQ ID NO: 5407
  Description of Artificial Sequence: Synthetic gluten; 5' sequence and inner sequence

SEQ ID NO: 41611 - DNA, 53 bp, Artificial Sequence
  Description of Artificial Sequence: Synthetic gluten; 5' sequence and inner sequence
tagggaagagaaggacatatgatcatgtgctaattcggacggacaagttcata

SEQ ID NO: 41612 - DNA, 53 bp, Artificial Sequence
  Description of Artificial Sequence: Synthetic gluten; 5' sequence and inner sequence
tagggaagagaaggacatatgattgacatgtgaccgactggcttagctgggca

SEQ ID NO: 41613 - DNA, 53 bp, Artificial Sequence
  Description of Artificial Sequence: Synthetic gluten; 5' sequence and inner sequence
tagggaagagaaggacatatgatggccgacgagaccctgcaattggccatgga

SEQ ID NO: 41614 - DNA, 53 bp, Artificial Sequence
  Description of Artificial Sequence: Synthetic gluten; 5' sequence and inner sequence
tagggaagagaaggacatatgatgtactgcgcgacctcaacgtgcgtgatgta

SEQ ID NO: 41615 - DNA, 53 bp, Artificial Sequence
  Description of Artificial Sequence: Synthetic gluten; 5' sequence and inner sequence
tagggaagagaaggacatatgatccgaacggcgtgtaatgggcaaacttcaga

SEQ ID NO: 41616 - DNA, 53 bp, Artificial Sequence
  Description of Artificial Sequence: Synthetic gluten; 5' sequence and inner sequence
tagggaagagaaggacatatgatggacgcaacgaacctaagagtggccaggga

SEQ ID NO: 41617 - DNA, 53 bp, Artificial Sequence
  Description of Artificial Sequence: Synthetic gluten; 5' sequence and inner sequence
tagggaagagaaggacatatgatggcctgcgatggatggggcaatacgacgtt

SEQ ID NO: 41618 - DNA, 53 bp, Artificial Sequence
  Description of Artificial Sequence: Synthetic gluten; 5' sequence and inner sequence
tagggaagagaaggacatatgatgacattcgagtcaccagtcatgcacgacga

SEQ ID NO: 41619 - DNA, 53 bp, Artificial Sequence
  Description of Artificial Sequence: Synthetic gluten; 5' sequence and inner sequence
tagggaagagaaggacatatgatggcccgaacgaccgttgaagagcatgcact

SEQ ID NO: 41620 - DNA, 53 bp, Artificial Sequence
  Description of Artificial Sequence: Synthetic gluten; 5' sequence and inner sequence
tagggaagagaaggacatatgattcatcagatggacgccgaatgggtgtgggc

SEQ ID NO: 41621 - DNA, 53 bp, Artificial Sequence
  Description of Artificial Sequence: Synthetic gluten; 5' sequence and inner sequence
tagggaagagaaggacatatgatggacgcgatggatgtggaaaggtctagtca

SEQ ID NO: 41622 - DNA, 53 bp, Artificial Sequence
  Description of Artificial Sequence: Synthetic gluten; 5' sequence and inner sequence
tagggaagagaaggacatatgatatggacgcagcgtaccttcaagtgctcgtg

SEQ ID NO: 41623 - DNA, 53 bp, Artificial Sequence
  Description of Artificial Sequence: Synthetic gluten; 5' sequence and inner sequence
tagggaagagaaggacatatgattggcatgcgatggttccgagaaagtgcgaa

SEQ ID NO: 41624 - DNA, 53 bp, Artificial Sequence
  Description of Artificial Sequence: Synthetic gluten; 5' sequence and inner sequence
tagggaagagaaggacatatgatggactgcgacttcacagatcaggcaatgca

SEQ ID NO: 41625 - DNA, 53 bp, Artificial Sequence
  Description of Artificial Sequence: Synthetic gluten; 5' sequence and inner sequence
tagggaagagaaggacatatgatggcattcgatgcactacaaggtgttgtgta

SEQ ID NO: 41626 - DNA, 53 bp, Artificial Sequence
  Description of Artificial Sequence: Synthetic gluten; 5' sequence and inner sequence
tagggaagagaaggacatatgatcatggctaaacagcagcgtaattcgtcata

SEQ ID NO: 41627 - DNA, 53 bp, Artificial Sequence
  Description of Artificial Sequence: Synthetic gluten; 5' sequence and inner sequence
tagggaagagaaggacatatgattcacagatggcgtgatctgaaccggtggca

SEQ ID NO: 41628 - DNA, 53 bp, Artificial Sequence
  Description of Artificial Sequence: Synthetic gluten; 5' sequence and inner sequence
tagggaagagaaggacatatgatggccgagctggatgtgagcatgcatctagt

SEQ ID NO: 41629 - DNA, 53 bp, Artificial Sequence
  Description of Artificial Sequence: Synthetic gluten; 5' sequence and inner sequence
tagggaagagaaggacatatgatccgatcagccctatcaagcatgcactgtct

SEQ ID NO: 41630 - DNA, 53 bp, Artificial Sequence
  Description of Artificial Sequence: Synthetic gluten; 5' sequence and inner sequence
tagggaagagaaggacatatgattcgaatatgtacgaagatgcccattcagtg

SEQ ID NO: 41631 - DNA, 53 bp, Artificial Sequence
  Description of Artificial Sequence: Synthetic gluten; 5' sequence and inner sequence
tagggaagagaaggacatatgatctcattagtggccgagaccgcaattccatc

SEQ ID NO: 41632 - DNA, 53 bp, Artificial Sequence; identical to SEQ ID NO: 37961
  Description of Artificial Sequence: Synthetic gluten; 5' sequence and inner sequence

SEQ ID NO: 41633 - DNA, 53 bp, Artificial Sequence
  Description of Artificial Sequence: Synthetic gluten; 5' sequence and inner sequence
tagggaagagaaggacatatgatccagcatctcataagtggccttacctgcct

SEQ ID NO: 41634 - DNA, 53 bp, Artificial Sequence
  Description of Artificial Sequence: Synthetic gluten; 5' sequence and inner sequence
tagggaagagaaggacatatgatgtcctgatcgccctagcaagcggccatgga

SEQ ID NO: 41635 - DNA, 53 bp, Artificial Sequence
  Description of Artificial Sequence: Synthetic gluten; 5' sequence and inner sequence
tagggaagagaaggacatatgatcctgacacgataaagatagagcttgcacga

SEQ ID NO: 41636 - DNA, 53 bp, Artificial Sequence
  Description of Artificial Sequence: Synthetic gluten; 5' sequence and inner sequence
tagggaagagaaggacatatgatcctgctggagcctgagccgaagatcagtca

SEQ ID NO: 41637 - DNA, 53 bp, Artificial Sequence
  Description of Artificial Sequence: Synthetic gluten; 5' sequence and inner sequence
tagggaagagaaggacatatgattcaagatggccgaacgaaacatggcagtca

SEQ ID NO: 41638 - DNA, 53 bp, Artificial Sequence
  Description of Artificial Sequence: Synthetic gluten; 5' sequence and inner sequence
tagggaagagaaggacatatgatcacaacgcaagtcttcctttatgtcatcta

SEQ ID NO: 41639 - DNA, 53 bp, Artificial Sequence
  Description of Artificial Sequence: Synthetic gluten; 5' sequence and inner sequence
tagggaagagaaggacatatgatccatcatagggttggtgccactgatgtata

SEQ ID NO: 41640 - DNA, 53 bp, Artificial Sequence
  Description of Artificial Sequence: Synthetic gluten; 5' sequence and inner sequence
tagggaagagaaggacatatgatcatgacgatcacagcgaggtttacgtcata

SEQ ID NO: 41641 - DNA, 48 bp, Artificial Sequence
  Description of Artificial Sequence: Synthetic gluten; 5' sequence and inner sequence
tagggaagagaaggacatatgatccgagctgacctatcaacgcggtca

SEQ ID NO: 41642 - DNA, 53 bp, Artificial Sequence
  Description of Artificial Sequence: Synthetic gluten; 5' sequence and inner sequence
tagggaagagaaggacatatgatagtcacgccctaacgttgcctatgctagca

SEQ ID NO: 41643 - DNA, 53 bp, Artificial Sequence
  Description of Artificial Sequence: Synthetic gluten; 5' sequence and inner sequence
tagggaagagaaggacatatgatccgatcgaaaccggagagcatgcacggagc

SEQ ID NO: 41644 - DNA, 53 bp, Artificial Sequence
  Description of Artificial Sequence: Synthetic gluten; 5' sequence and inner sequence
tagggaagagaaggacatatgatatgtactgtatccacggtcatagagcatca

SEQ ID NO: 41645 - DNA, 53 bp, Artificial Sequence
  Description of Artificial Sequence: Synthetic gluten; 5' sequence and inner sequence
tagggaagagaaggacatatgatcgtaccgcaagtgacgcgtccgtgccgtga

SEQ ID NO: 41646 - DNA, 50 bp, Artificial Sequence
  Description of Artificial Sequence: Synthetic gluten; 5' sequence and inner sequence
tagggaagagaaggacatatgatcctgagcgcacctgggcatcactgtca

SEQ ID NO: 41647 - DNA, 53 bp, Artificial Sequence
  Description of Artificial Sequence: Synthetic gluten; 5' sequence and inner sequence
tagggaagagaaggacatatgattatggactgagcggaactgcactatgcatg

SEQ ID NO: 41648 - DNA, 53 bp, Artificial Sequence; identical to SEQ ID NO: 1791
  Description of Artificial Sequence: Synthetic gluten; 5' sequence and inner sequence

SEQ ID NO: 41649 - DNA, 53 bp, Artificial Sequence
  Description of Artificial Sequence: Synthetic gluten; 5' sequence and inner sequence
tagggaagagaaggacatatgataatgtggactgagcggaacttaagatagta

SEQ ID NO: 41650 - DNA, 53 bp, Artificial Sequence
  Description of Artificial Sequence: Synthetic gluten; 5' sequence and inner sequence
tagggaagagaaggacatatgattcttcgcggaacgatttagacgcgtcaact

SEQ ID NO: 41651 - DNA, 53 bp, Artificial Sequence; identical to SEQ ID NO: 1926
  Description of Artificial Sequence: Synthetic gluten; 5' sequence and inner sequence

SEQ ID NO: 41652 - DNA, 53 bp, Artificial Sequence
  Description of Artificial Sequence: Synthetic gluten; 5' sequence and inner sequence
tagggaagagaaggacatatgatggactgaacgagcctagtcttagcgtgtct

SEQ ID NO: 41653 - DNA, 53 bp, Artificial Sequence; identical to SEQ ID NO: 1063
  Description of Artificial Sequence: Synthetic gluten; 5' sequence and inner sequence

SEQ ID NO: 41654 - DNA, 53 bp, Artificial Sequence
  Description of Artificial Sequence: Synthetic gluten; 5' sequence and inner sequence
tagggaagagaaggacatatgatcctgaacgcgtcctaatgagtcattacgaa

SEQ ID NO: 41655 - DNA, 53 bp, Artificial Sequence
  Description of Artificial Sequence: Synthetic gluten; 5' sequence and inner sequence
tagggaagagaaggacatatgatccgagcggaaatggaataggcaaaccagct

SEQ ID NO: 41656 - DNA, 53 bp, Artificial Sequence
  Description of Artificial Sequence: Synthetic gluten; 5' sequence and inner sequence
tagggaagagaaggacatatgatccgagcgacattacaaggcaaaactttggt

SEQ ID NO: 41657 - DNA, 53 bp, Artificial Sequence
  Description of Artificial Sequence: Synthetic gluten; 5' sequence and inner sequence
tagggaagagaaggacatatgatcgaaacgcggtgcagtaagatgtgcttcgc

SEQ ID NO: 41658 - DNA, 53 bp, Artificial Sequence
  Description of Artificial Sequence: Synthetic gluten; 5' sequence and inner sequence
tagggaagagaaggacatatgatgtcatgcgcggaccttcaagtaggcgtgta

SEQ ID NO: 41659 - DNA, 53 bp, Artificial Sequence
  Description of Artificial Sequence: Synthetic gluten; 5' sequence and inner sequence
tagggaagagaaggacatatgataatgtgtcatgatcgcaccctcaagttggc

SEQ ID NO: 41660 - DNA, 53 bp, Artificial Sequence
  Description of Artificial Sequence: Synthetic gluten; 5' sequence and inner sequence
tagggaagagaaggacatatgatcggtccagataccagacgggctaggcacaa

SEQ ID NO: 41661 - DNA, 53 bp, Artificial Sequence
  Description of Artificial Sequence: Synthetic gluten; 5' sequence and inner sequence
tagggaagagaaggacatatgatcttacctagcacgtggacaggtaggcggac

SEQ ID NO: 41662 - DNA, 53 bp, Artificial Sequence
  Description of Artificial Sequence: Synthetic gluten; 5' sequence and inner sequence
tagggaagagaaggacatatgatcctgcgcgaaccgttagaactagtactggc

SEQ ID NO: 41663 - DNA, 53 bp, Artificial Sequence
  Description of Artificial Sequence: Synthetic gluten; 5' sequence and inner sequence
tagggaagagaaggacatatgatggcctgatcgaacctagagagtggcgagga

SEQ ID NO: 41664 - DNA, 53 bp, Artificial Sequence
  Description of Artificial Sequence: Synthetic gluten; 5' sequence and inner sequence
tagggaagagaaggacatatgatctcatcacatggccgaccgtagatggacga

SEQ ID NO: 41665 - DNA, 53 bp, Artificial Sequence
  Description of Artificial Sequence: Synthetic gluten; 5' sequence and inner sequence
tagggaagagaaggacatatgatcatgtacacaccaaagttagcttgctcata

SEQ ID NO: 41666 - DNA, 53 bp, Artificial Sequence
  Description of Artificial Sequence: Synthetic gluten; 5' sequence and inner sequence
tagggaagagaaggacatatgattggcatgaacgaacctattcaaacggtcta

SEQ ID NO: 41667 - DNA, 53 bp, Artificial Sequence
  Description of Artificial Sequence: Synthetic gluten; 5' sequence and inner sequence
tagggaagagaaggacatatgatgtgctcgaaacccgtaagtggcatggcgta

SEQ ID NO: 41668 - DNA, 53 bp, Artificial Sequence
  Description of Artificial Sequence: Synthetic gluten; 5' sequence and inner sequence
tagggaagagaaggacatatgatcatgcccaacgggatgtacgcctagtccaa

SEQ ID NO: 41669 - DNA, 53 bp, Artificial Sequence; identical to SEQ ID NO: 1943
  Description of Artificial Sequence: Synthetic gluten; 5' sequence and inner sequence

SEQ ID NO: 41670 - DNA, 53 bp, Artificial Sequence
  Description of Artificial Sequence: Synthetic gluten; 5' sequence and inner sequence
tagggaagagaaggacatatgatcgacagagccgaagaacgagtgttaacgca

SEQ ID NO: 41671 - DNA, 53 bp, Artificial Sequence
  Description of Artificial Sequence: Synthetic gluten; 5' sequence and inner sequence
tagggaagagaaggacatatgatgtcatgcgataccctaacgagctaggcata

SEQ ID NO: 41672 - DNA, 53 bp, Artificial Sequence; identical to SEQ ID NO: 5348
  Description of Artificial Sequence: Synthetic gluten; 5' sequence and inner sequence

SEQ ID NO: 41673 - DNA, 53 bp, Artificial Sequence
  Description of Artificial Sequence: Synthetic gluten; 5' sequence and inner sequence
tagggaagagaaggacatatgatggactgaacgacccctagatatggacgaga

SEQ ID NO: 41674 - DNA, 53 bp, Artificial Sequence
  Description of Artificial Sequence: Synthetic gluten; 5' sequence and inner sequence
tagggaagagaaggacatatgatgccacatcgtccctagcaagcaggcttgta

SEQ ID NO: 41675 - DNA, 53 bp, Artificial Sequence
  Description of Artificial Sequence: Synthetic gluten; 5' sequence and inner sequence
tagggaagagaaggacatatgattgagatggcctgatcggaaagtacgacgta

SEQ ID NO: 41676 - DNA, 53 bp, Artificial Sequence
  Description of Artificial Sequence: Synthetic gluten; 5' sequence and inner sequence
tagggaagagaaggacatatgatccgacgatgaaccaaccatgctactttggc

SEQ ID NO: 41677 - DNA, 53 bp, Artificial Sequence
  Description of Artificial Sequence: Synthetic gluten; 5' sequence and inner sequence
tagggaagagaaggacatatgatcacaacgtgcgaaataggactgatcgagcc

SEQ ID NO: 41678 - DNA, 53 bp, Artificial Sequence
  Description of Artificial Sequence: Synthetic gluten; 5' sequence and inner sequence
tagggaagagaaggacatatgatcatgacggacagcagctcttagtaggcata

SEQ ID NO: 41679 - DNA, 53 bp, Artificial Sequence
  Description of Artificial Sequence: Synthetic gluten; 5' sequence and inner sequence
tagggaagagaaggacatatgatggactgaacgaaccggtaagaacatgggaa

SEQ ID NO: 41680 - DNA, 53 bp, Artificial Sequence
  Description of Artificial Sequence: Synthetic gluten; 5' sequence and inner sequence
tagggaagagaaggacatatgatcatgtacccaacactagccaccggggcata

SEQ ID NO: 41681 - DNA, 53 bp, Artificial Sequence
  Description of Artificial Sequence: Synthetic gluten; 5' sequence and inner sequence
tagggaagagaaggacatatgatgtgcggaacgagcccttcgagtgccatgga

SEQ ID NO: 41682 - DNA, 53 bp, Artificial Sequence
  Description of Artificial Sequence: Synthetic gluten; 5' sequence and inner sequence
tagggaagagaaggacatatgattacacattggccgacgattcactaaggaca

SEQ ID NO: 41683 - DNA, 48 bp, Artificial Sequence
  Description of Artificial Sequence: Synthetic gluten; 5' sequence and inner sequence
tagggaagagaaggacatatgatggcatgcgatggatgtgtgcatgta

SEQ ID NO: 41684 - DNA, 53 bp, Artificial Sequence
  Description of Artificial Sequence: Synthetic gluten; 5' sequence and inner sequence
tagggaagagaaggacatatgatccgatcgacacctgggactgatctgacata

SEQ ID NO: 41685 - DNA, 53 bp, Artificial Sequence; identical to SEQ ID NO: 1406
  Description of Artificial Sequence: Synthetic gluten; 5' sequence and inner sequence

SEQ ID NO: 41686 - DNA, 53 bp, Artificial Sequence
  Description of Artificial Sequence: Synthetic gluten; 5' sequence and inner sequence
tagggaagagaaggacatatgatcatgtgacggaaaagagcggtatcgtcata

SEQ ID NO: 41687 - DNA, 54 bp, Artificial Sequence
  Description of Artificial Sequence: Synthetic gluten; 5' sequence and inner sequence
tagggaagagaaggacatatgatacacatggcatgagcgatccttcaggtggga

SEQ ID NO: 41688 - DNA, 53 bp, Artificial Sequence
  Description of Artificial Sequence: Synthetic gluten; 5' sequence and inner sequence
tagggaagagaaggacatatgatcgaacgcaagctcgagacaatggcattcga

SEQ ID NO: 41689 - DNA, 53 bp, Artificial Sequence; identical to SEQ ID NO: 1478
  Description of Artificial Sequence: Synthetic gluten; 5' sequence and inner sequence

SEQ ID NO: 41690 - DNA, 53 bp, Artificial Sequence; identical to SEQ ID NO: 1092
  Description of Artificial Sequence: Synthetic gluten; 5' sequence and inner sequence

SEQ ID NO: 41691 - DNA, 53 bp, Artificial Sequence
  Description of Artificial Sequence: Synthetic gluten; 5' sequence and inner sequence
tagggaagagaaggacatatgataatgtgcccgctgattcccttcgagtgtca

SEQ ID NO: 41692 - DNA, 53 bp, Artificial Sequence
  Description of Artificial Sequence: Synthetic gluten; 5' sequence and inner sequence
tagggaagagaaggacatatgatacattggacggaacgacccttcaagcgtgc

SEQ ID NO: 41693 - DNA, 53 bp, Artificial Sequence; identical to SEQ ID NO: 13872
  Description of Artificial Sequence: Synthetic gluten; 5' sequence and inner sequence

SEQ ID NO: 41694 - DNA, 53 bp, Artificial Sequence
  Description of Artificial Sequence: Synthetic gluten; 5' sequence and inner sequence
tagggaagagaaggacatatgatgtgcgaacacgagcctatcaaggaggcatg

SEQ ID NO: 41695 - DNA, 53 bp, Artificial Sequence
  Description of Artificial Sequence: Synthetic gluten; 5' sequence and inner sequence
tagggaagagaaggacatatgatgtacgatcgcaccctaggcatgtcgacgct

SEQ ID NO: 41696 - DNA, 53 bp, Artificial Sequence
  Description of Artificial Sequence: Synthetic gluten; 5' sequence and inner sequence
tagggaagagaaggacatatgatacgatcgcaccatcaagtcggccttggaca

SEQ ID NO: 41697 - DNA, 53 bp, Artificial Sequence
  Description of Artificial Sequence: Synthetic gluten; 5' sequence and inner sequence
tagggaagagaaggacatatgatggccgagcttcccgagtcaaatgctaggcg

SEQ ID NO: 41698 - DNA, 53 bp, Artificial Sequence
  Description of Artificial Sequence: Synthetic gluten; 5' sequence and inner sequence
tagggaagagaaggacatatgatcgtgtacgaatctagcaccgcgttggcata

SEQ ID NO: 41699 - DNA, 53 bp, Artificial Sequence; identical to SEQ ID NO: 5881
  Description of Artificial Sequence: Synthetic gluten; 5' sequence and inner sequence

SEQ ID NO: 41700 - DNA, 53 bp, Artificial Sequence
  Description of Artificial Sequence: Synthetic gluten; 5' sequence and inner sequence
tagggaagagaaggacatatgatggccgacctggatgcgagcatgcatctagt

SEQ ID NO: 41701 - DNA, 53 bp, Artificial Sequence
  Description of Artificial Sequence: Synthetic gluten; 5' sequence and inner sequence
tagggaagagaaggacatatgatggacggatcgaacctacaaggtgtcgtgga

SEQ ID NO: 41702 - DNA, 53 bp, Artificial Sequence
  Description of Artificial Sequence: Synthetic gluten; 5' sequence and inner sequence
tagggaagagaaggacatatgatggcattcgatgcactacaagatgttgtgta

SEQ ID NO: 41703 - DNA, 53 bp, Artificial Sequence
  Description of Artificial Sequence: Synthetic gluten; 5' sequence and inner sequence
tagggaagagaaggacatatgatggcattcgatgcaccttcgtcagtctgtca

SEQ ID NO: 41704 - DNA, 53 bp, Artificial Sequence
  Description of Artificial Sequence: Synthetic gluten; 5' sequence and inner sequence
tagggaagagaaggacatatgatgagaacgcaggacaaatctatgggctgatc

SEQ ID NO: 41705 - DNA, 53 bp, Artificial Sequence
  Description of Artificial Sequence: Synthetic gluten; 5' sequence and inner sequence
tagggaagagaaggacatatgatccgactcggaactagggaattggcgcagtc

SEQ ID NO: 41706 - DNA, 53 bp, Artificial Sequence; identical to SEQ ID NO: 29406
  Description of Artificial Sequence: Synthetic gluten; 5' sequence and inner sequence

SEQ ID NO: 41707 - DNA, 53 bp, Artificial Sequence
  Description of Artificial Sequence: Synthetic gluten; 5' sequence and inner sequence
tagggaagagaaggacatatgatcaacaggaactgctggcctttatgtcacta

SEQ ID NO: 41708 - DNA, 53 bp, Artificial Sequence; identical to SEQ ID NO: 33332
  Description of Artificial Sequence: Synthetic gluten; 5' sequence and inner sequence

SEQ ID NO: 41709 - DNA, 53 bp, Artificial Sequence; identical to SEQ ID NO: 1026
  Description of Artificial Sequence: Synthetic gluten; 5' sequence and inner sequence

SEQ ID NO: 41710 - DNA, 54 bp, Artificial Sequence
  Description of Artificial Sequence: Synthetic gluten; 5' sequence and inner sequence
tagggaagagaaggacatatgatgtccgactcggcccgaagaacttgtcacagc

SEQ ID NO: 41711 - DNA, 53 bp, Artificial Sequence
  Description of Artificial Sequence: Synthetic gluten; 5' sequence and inner sequence
tagggaagagaaggacatatgatccgacgacgccctgaaaggcaggcacgtac

SEQ ID NO: 41712 - DNA, 53 bp, Artificial Sequence; identical to SEQ ID NO: 29600
  Description of Artificial Sequence: Synthetic gluten; 5' sequence and inner sequence

SEQ ID NO: 41713 - DNA, 53 bp, Artificial Sequence
  Description of Artificial Sequence: Synthetic gluten; 5' sequence and inner sequence
tagggaagagaaggacatatgattgttcacaaccctactggtcactcgcttca

SEQ ID NO: 41714 - DNA, 53 bp, Artificial Sequence; identical to SEQ ID NO: 1237
  Description of Artificial Sequence: Synthetic gluten; 5' sequence and inner sequence

SEQ ID NO: 41715 - DNA, 53 bp, Artificial Sequence
  Description of Artificial Sequence: Synthetic gluten; 5' sequence and inner sequence
tagggaagagaaggacatatgatggcctgaacttcccgtagtacgtgtcattt

SEQ ID NO: 41716 - DNA, 53 bp, Artificial Sequence; identical to SEQ ID NO: 37179
  Description of Artificial Sequence: Synthetic gluten; 5' sequence and inner sequence

SEQ ID NO: 41717 - DNA, 53 bp, Artificial Sequence
  Description of Artificial Sequence: Synthetic gluten; 5' sequence and inner sequence
tagggaagagaaggacatatgatgtacttcgactgcctatcaagtcgcatgta

SEQ ID NO: 41718 - DNA, 53 bp, Artificial Sequence
  Description of Artificial Sequence: Synthetic gluten; 5' sequence and inner sequence
tagggaagagaaggacatatgatacgagccggagagaatggcaaagcgtgcta

SEQ ID NO: 41719 - DNA, 53 bp, Artificial Sequence
  Description of Artificial Sequence: Synthetic gluten; 5' sequence and inner sequence
tagggaagagaaggacatatgatgacgcacgcctccctagggacatgcacgta

SEQ ID NO: 41720 - DNA, 53 bp, Artificial Sequence
  Description of Artificial Sequence: Synthetic gluten; 5' sequence and inner sequence
tagggaagagaaggacatatgatggacggatcgaacctacaagatgtcgtgga

SEQ ID NO: 41721 - DNA, 53 bp, Artificial Sequence
  Description of Artificial Sequence: Synthetic gluten; 5' sequence and inner sequence
tagggaagagaaggacatatgatatcgattggcagaaagtcgtaacggcaata

SEQ ID NO: 41722 - DNA, 53 bp, Artificial Sequence
  Description of Artificial Sequence: Synthetic gluten; 5' sequence and inner sequence
tagggaagagaaggacatatgatcacagaacgcgacgaagttatgtctcacac

SEQ ID NO: 41723 - DNA, 53 bp, Artificial Sequence
  Description of Artificial Sequence: Synthetic gluten; 5' sequence and inner sequence
tagggaagagaaggacatatgattggaccgagcgacctgtactcatcacagcg

SEQ ID NO: 41724 - DNA, 53 bp, Artificial Sequence; identical to SEQ ID NO: 1131
  Description of Artificial Sequence: Synthetic gluten; 5' sequence and inner sequence

SEQ ID NO: 41725 - DNA, 53 bp, Artificial Sequence
  Description of Artificial Sequence: Synthetic gluten; 5' sequence and inner sequence
tagggaagagaaggacatatgatgtacgcacacgaccctcaagagtgcatgga

SEQ ID NO: 41726 - DNA, 53 bp, Artificial Sequence
  Description of Artificial Sequence: Synthetic gluten; 5' sequence and inner sequence
tagggaagagaaggacatatgatccgagcgcgacctaaagagagaagtactgc

SEQ ID NO: 41727 - DNA, 53 bp, Artificial Sequence
  Description of Artificial Sequence: Synthetic gluten; 5' sequence and inner sequence
tagggaagagaaggacatatgatactttcgctgaacgttgaatagagcgatca

SEQ ID NO: 41728 - DNA, 53 bp, Artificial Sequence
  Description of Artificial Sequence: Synthetic gluten; 5' sequence and inner sequence
tagggaagagaaggacatatgatgtacaatctggcctagcaagtgcgtatgta

SEQ ID NO: 41729 - DNA, 53 bp, Artificial Sequence
  Description of Artificial Sequence: Synthetic gluten; 5' sequence and inner sequence
tagggaagagaaggacatatgatagcgacagagccgaagagaaaggcaattta

SEQ ID NO: 41730 - DNA, 53 bp, Artificial Sequence
  Description of Artificial Sequence: Synthetic gluten; 5' sequence and inner sequence
tagggaagagaaggacatatgatggccacgacatcagatgaacttgtctggat

SEQ ID NO: 41731 - DNA, 53 bp, Artificial Sequence
  Description of Artificial Sequence: Synthetic gluten; 5' sequence and inner sequence
tagggaagagaaggacatatgattgaacaccgtcaaccataatggacgcgctc

SEQ ID NO: 41732 - DNA, 52 bp, Artificial Sequence
  Description of Artificial Sequence: Synthetic gluten; 5' sequence and inner sequence
tagggaagagaaggacatatgattggcctgagcgaccatggactgacgtagt

SEQ ID NO: 41733 - DNA, 53 bp, Artificial Sequence; identical to SEQ ID NO: 1213
  Description of Artificial Sequence: Synthetic gluten; 5' sequence and inner sequence

SEQ ID NO: 41734 - DNA, 53 bp, Artificial Sequence
  Description of Artificial Sequence: Synthetic gluten; 5' sequence and inner sequence
tagggaagagaaggacatatgatcgagactagagccgaagattcagtcagaat

SEQ ID NO: 41735 - DNA, 53 bp, Artificial Sequence
  Description of Artificial Sequence: Synthetic gluten; 5' sequence and inner sequence
tagggaagagaaggacatatgatatggccgccgctgaacatggattagtcata

SEQ ID NO: 41736 - DNA, 53 bp, Artificial Sequence
  Description of Artificial Sequence: Synthetic gluten; 5' sequence and inner sequence
tagggaagagaaggacatatgatggccggaacgccactcaagtcgtgatgtgc

SEQ ID NO: 41737 - DNA, 53 bp, Artificial Sequence
  Description of Artificial Sequence: Synthetic gluten; 5' sequence and inner sequence
tagggaagagaaggacatatgatctgaacgaccgagctgagaacatggataga

SEQ ID NO: 41738 - DNA, 53 bp, Artificial Sequence
  Description of Artificial Sequence: Synthetic gluten; 5' sequence and inner sequence
tagggaagagaaggacatatgatcctgagcgaaccctagtagtaggcactgta

SEQ ID NO: 41739 - DNA, 53 bp, Artificial Sequence
  Description of Artificial Sequence: Synthetic gluten; 5' sequence and inner sequence
tagggaagagaaggacatatgatccgaagatggacgaaaggtgaggtacgatg

SEQ ID NO: 41740 - DNA, 53 bp, Artificial Sequence
  Description of Artificial Sequence: Synthetic gluten; 5' sequence and inner sequence
tagggaagagaaggacatatgatggcatgcgaaacaagttcacacccgtcgct

SEQ ID NO: 41741 - DNA, 53 bp, Artificial Sequence; identical to SEQ ID NO: 1118
  Description of Artificial Sequence: Synthetic gluten; 5' sequence and inner sequence

SEQ ID NO: 41742 - DNA, 53 bp, Artificial Sequence; identical to SEQ ID NO: 5605
  Description of Artificial Sequence: Synthetic gluten; 5' sequence and inner sequence

SEQ ID NO: 41743 - DNA, 53 bp, Artificial Sequence; identical to SEQ ID NO: 25877
  Description of Artificial Sequence: Synthetic gluten; 5' sequence and inner sequence

SEQ ID NO: 41744 - DNA, 53 bp, Artificial Sequence
  Description of Artificial Sequence: Synthetic gluten; 5' sequence and inner sequence
tagggaagagaaggacatatgatatggacttgcgaagggttctaacgctaaca

SEQ ID NO: 41745 - DNA, 53 bp, Artificial Sequence
  Description of Artificial Sequence: Synthetic gluten; 5' sequence and inner sequence
tagggaagagaaggacatatgatcgaactggcatagttagattcgtacctggc

SEQ ID NO: 41746 - DNA, 53 bp, Artificial Sequence
  Description of Artificial Sequence: Synthetic gluten; 5' sequence and inner sequence
tagggaagagaaggacatatgatccgcactcggacctcaagtgtacgacggca

SEQ ID NO: 41747 - DNA, 53 bp, Artificial Sequence
  Description of Artificial Sequence: Synthetic gluten; 5' sequence and inner sequence
tagggaagagaaggacatatgatacatatggccgaccgagtcactgcaatgga

SEQ ID NO: 41748 - DNA, 53 bp, Artificial Sequence
  Description of Artificial Sequence: Synthetic gluten; 5' sequence and inner sequence
tagggaagagaaggacatatgatcattcgatgagcgtaggcagactaggcagg

SEQ ID NO: 41749 - DNA, 53 bp, Artificial Sequence
  Description of Artificial Sequence: Synthetic gluten; 5' sequence and inner sequence
tagggaagagaaggacatatgatggcctgatcgaaactagagagtggcgtgga

SEQ ID NO: 41750 - DNA, 53 bp, Artificial Sequence
  Description of Artificial Sequence: Synthetic gluten; 5' sequence and inner sequence
tagggaagagaaggacatatgattaggtccgaagcgcaatgtaataggcacta

SEQ ID NO: 41751 - DNA, 53 bp, Artificial Sequence
  Description of Artificial Sequence: Synthetic gluten; 5' sequence and inner sequence
tagggaagagaaggacatatgatggactgagcgacggaatgcactggtcaatt

SEQ ID NO: 41752 - DNA, 53 bp, Artificial Sequence
  Description of Artificial Sequence: Synthetic gluten; 5' sequence and inner sequence
tagggaagagaaggacatatgatggcctgcgatggatgaggagctgcactagt

SEQ ID NO: 41753 - DNA, 53 bp, Artificial Sequence
  Description of Artificial Sequence: Synthetic gluten; 5' sequence and inner sequence
tagggaagagaaggacatatgatccgatcgaccgatgtcattctacggcagca

SEQ ID NO: 41754 - DNA, 53 bp, Artificial Sequence
  Description of Artificial Sequence: Synthetic gluten; 5' sequence and inner sequence
tagggaagagaaggacatatgatggccgaacgcacacgagcgagatgtcaact

SEQ ID NO: 41755 - DNA, 53 bp, Artificial Sequence
  Description of Artificial Sequence: Synthetic gluten; 5' sequence and inner sequence
tagggaagagaaggacatatgatcattcgcgacccgtacatgggattgacgta

SEQ ID NO: 41756 - DNA, 53 bp, Artificial Sequence
  Description of Artificial Sequence: Synthetic gluten; 5' sequence and inner sequence
tagggaagagaaggacatatgatatggccgaatcgccacaagagcatgtcgaa

SEQ ID NO: 41757 - DNA, 53 bp, Artificial Sequence
  Description of Artificial Sequence: Synthetic gluten; 5' sequence and inner sequence
tagggaagagaaggacatatgatccttcgcgaaccgtgtcagcgtacgatggc

SEQ ID NO: 41758 - DNA, 53 bp, Artificial Sequence
  Description of Artificial Sequence: Synthetic gluten; 5' sequence and inner sequence
tagggaagagaaggacatatgatcgtaccgagtcagccgtaggtcactgtgga

SEQ ID NO: 41759 - DNA, 53 bp, Artificial Sequence
  Description of Artificial Sequence: Synthetic gluten; 5' sequence and inner sequence
tagggaagagaaggacatatgatggcatgcgaggaactagcaagtcgttcgtg

SEQ ID NO: 41760 - DNA, 53 bp, Artificial Sequence
  Description of Artificial Sequence: Synthetic gluten; 5' sequence and inner sequence
tagggaagagaaggacatatgatcgcgcatgcaaagaagagccgaagatccct

SEQ ID NO: 41761 - DNA, 53 bp, Artificial Sequence
  Description of Artificial Sequence: Synthetic gluten; 5' sequence and inner sequence
tagggaagagaaggacatatgatccatctcgccccgtcaatgtgatcatgcac

SEQ ID NO: 41762 - DNA, 53 bp, Artificial Sequence
  Description of Artificial Sequence: Synthetic gluten; 5' sequence and inner sequence
tagggaagagaaggacatatgatgcagtcagatggacgacgagttcactaggt

SEQ ID NO: 41763 - DNA, 53 bp, Artificial Sequence
  Description of Artificial Sequence: Synthetic gluten; 5' sequence and inner sequence
tagggaagagaaggacatatgatggcatgcgctgggtagtgatcacgtacggc

SEQ ID NO: 41764 - DNA, 53 bp, Artificial Sequence
  Description of Artificial Sequence: Synthetic gluten; 5' sequence and inner sequence
tagggaagagaaggacatatgatggccgacctggatgtgagcatgcatctaga

SEQ ID NO: 41765 - DNA, 53 bp, Artificial Sequence; identical to SEQ ID NO: 5924
  Description of Artificial Sequence: Synthetic gluten; 5' sequence and inner sequence

SEQ ID NO: 41766 - DNA, 54 bp, Artificial Sequence
  Description of Artificial Sequence: Synthetic gluten; 5' sequence and inner sequence
tagggaagagaaggacatatgatggcctgcgatggatgtgatcgtgcaatagtc

SEQ ID NO: 41767 - DNA, 53 bp, Artificial Sequence
  Description of Artificial Sequence: Synthetic gluten; 5' sequence and inner sequence
tagggaagagaaggacatatgattgtcctgcgcgacctacgagtgggatggta

SEQ ID NO: 41768 - DNA, 53 bp, Artificial Sequence
  Description of Artificial Sequence: Synthetic gluten; 5' sequence and inner sequence
tagggaagagaaggacatatgatcgcacctactacatgcattaataaggtgta

SEQ ID NO: 41769 - DNA, 53 bp, Artificial Sequence
  Description of Artificial Sequence: Synthetic gluten; 5' sequence and inner sequence
tagggaagagaaggacatatgatgaacgcacgatgagcgccaagtgacatgga

SEQ ID NO: 41770 - DNA, 53 bp, Artificial Sequence
  Description of Artificial Sequence: Synthetic gluten; 5' sequence and inner sequence
tagggaagagaaggacatatgatggcctgctcgaacctagagagtggcgtgga

SEQ ID NO: 41771 - DNA, 53 bp, Artificial Sequence
  Description of Artificial Sequence: Synthetic gluten; 5' sequence and inner sequence
tagggaagagaaggacatatgatatggacgaacgagcccaagtgcgccatgga

SEQ ID NO: 41772 - DNA, 53 bp, Artificial Sequence; identical to SEQ ID NO: 37546
  Description of Artificial Sequence: Synthetic gluten; 5' sequence and inner sequence

SEQ ID NO: 41773 - DNA, 53 bp, Artificial Sequence
  Description of Artificial Sequence: Synthetic gluten; 5' sequence and inner sequence
tagggaagagaaggacatatgataggccgcactcgtcacgcaatggccatgga

SEQ ID NO: 41774 - DNA, 53 bp, Artificial Sequence
  Description of Artificial Sequence: Synthetic gluten; 5' sequence and inner sequence
tagggaagagaaggacatatgatggcatgcgaagtccagtggattgtgctcgt

SEQ ID NO: 41775 - DNA, 53 bp, Artificial Sequence
  Description of Artificial Sequence: Synthetic gluten; 5' sequence and inner sequence
tagggaagagaaggacatatgatcatgcacgaactaacaggggactcctcata

SEQ ID NO: 41776 - DNA, 53 bp, Artificial Sequence
  Description of Artificial Sequence: Synthetic gluten; 5' sequence and inner sequence
tagggaagagaaggacatatgatccatcagatggccgagtcgagtgatggtcg

SEQ ID NO: 41777 - DNA, 52 bp, Artificial Sequence
  Description of Artificial Sequence: Synthetic gluten; 5' sequence and inner sequence
tagggaagagaaggacatatgatccaatcacatggccgatctggatgtgtgt

SEQ ID NO: 41778 - DNA, 53 bp, Artificial Sequence
  Description of Artificial Sequence: Synthetic gluten; 5' sequence and inner sequence
tagggaagagaaggacatatgatcttcccgcagaacatggcccgaacgtcatc

SEQ ID NO: 41779 - DNA, 53 bp, Artificial Sequence
  Description of Artificial Sequence: Synthetic gluten; 5' sequence and inner sequence
tagggaagagaaggacatatgatccgatcgaccaaagaacatcgtgcgacggt

SEQ ID NO: 41780 - DNA, 53 bp, Artificial Sequence
  Description of Artificial Sequence: Synthetic gluten; 5' sequence and inner sequence
tagggaagagaaggacatatgatgtcatgcgcgtaccgtcaagtgcgaatgga

SEQ ID NO: 41781 - DNA, 53 bp, Artificial Sequence
  Description of Artificial Sequence: Synthetic gluten; 5' sequence and inner sequence
tagggaagagaaggacatatgattggcctgcgagtacctgtgatagtccttga

SEQ ID NO: 41782 - DNA, 53 bp, Artificial Sequence
  Description of Artificial Sequence: Synthetic gluten; 5' sequence and inner sequence
tagggaagagaaggacatatgatgtcattcgctgaacgttcaagggacgtgga

SEQ ID NO: 41783 - DNA, 53 bp, Artificial Sequence
  Description of Artificial Sequence: Synthetic gluten; 5' sequence and inner sequence
tagggaagagaaggacatatgatcatgtcgccaagagcacgtatgtcgtcata

SEQ ID NO: 41784 - DNA, 53 bp, Artificial Sequence
  Description of Artificial Sequence: Synthetic gluten; 5' sequence and inner sequence
tagggaagagaaggacatatgatggcatgcgctgggtagcgatcacgtacggt

SEQ ID NO: 41785 - DNA, 53 bp, Artificial Sequence
  Description of Artificial Sequence: Synthetic gluten; 5' sequence and inner sequence
tagggaagagaaggacatatgatccgaagcgagcctaggtctttacgctggct

SEQ ID NO: 41786 - DNA, 53 bp, Artificial Sequence
  Description of Artificial Sequence: Synthetic gluten; 5' sequence and inner sequence
tagggaagagaaggacatatgatacaatcacaattgacaaaacgtgcatgctg

SEQ ID NO: 41787 - DNA, 53 bp, Artificial Sequence
  Description of Artificial Sequence: Synthetic gluten; 5' sequence and inner sequence
tagggaagagaaggacatatgatcgcacgttacggaggataacggtatgggta

SEQ ID NO: 41788 - DNA, 53 bp, Artificial Sequence
  Description of Artificial Sequence: Synthetic gluten; 5' sequence and inner sequence
tagggaagagaaggacatatgatggactgaacgcaccgaaatgtcaggacgca

SEQ ID NO: 41789 - DNA, 53 bp, Artificial Sequence
  Description of Artificial Sequence: Synthetic gluten; 5' sequence and inner sequence
tagggaagagaaggacatatgatccgacaatgaccgtaatgagagcatgcgac

SEQ ID NO: 41790 - DNA, 53 bp, Artificial Sequence
  Description of Artificial Sequence: Synthetic gluten; 5' sequence and inner sequence
tagggaagagaaggacatatgatccgttgatggactaaaggtgactactaagc

SEQ ID NO: 41791 - DNA, 53 bp, Artificial Sequence
  Description of Artificial Sequence: Synthetic gluten; 5' sequence and inner sequence
tagggaagagaaggacatatgatggcctgcgctgggtagtgatcacgtacggt

SEQ ID NO: 41792 - DNA, 53 bp, Artificial Sequence
  Description of Artificial Sequence: Synthetic gluten; 5' sequence and inner sequence
tagggaagagaaggacatatgatcaacaccactgcagtagattatggctcacg

SEQ ID NO: 41793 - DNA, 52 bp, Artificial Sequence
  Description of Artificial Sequence: Synthetic gluten; 5' sequence and inner sequence
tagggaagagaaggacatatgattggccaagcgacctagcaagtgcagcatg

SEQ ID NO: 41794 - DNA, 53 bp, Artificial Sequence
  Description of Artificial Sequence: Synthetic gluten; 5' sequence and inner sequence
tagggaagagaaggacatatgatacgtccgacgaatgaggactagaggttggg

SEQ ID NO: 41795 - DNA, 53 bp, Artificial Sequence; identical to SEQ ID NO: 1364
  Description of Artificial Sequence: Synthetic gluten; 5' sequence and inner sequence

SEQ ID NO: 41796 - DNA, 53 bp, Artificial Sequence
  Description of Artificial Sequence: Synthetic gluten; 5' sequence and inner sequence
tagggaagagaaggacatatgatggccggctataccctacacgtgatcaggta

SEQ ID NO: 41797 - DNA, 52 bp, Artificial Sequence
  Description of Artificial Sequence: Synthetic gluten; 5' sequence and inner sequence
tagggaagagaaggacatatgatgtacgacgcggaccttcaagtcggccatg

SEQ ID NO: 41798 - DNA, 53 bp, Artificial Sequence
  Description of Artificial Sequence: Synthetic gluten; 5' sequence and inner sequence
tagggaagagaaggacatatgatcatgtacgctaacggcaagcaatgctcata

SEQ ID NO: 41799 - DNA, 53 bp, Artificial Sequence
  Description of Artificial Sequence: Synthetic gluten; 5' sequence and inner sequence
tagggaagagaaggacatatgatggactgctcagcacaaacgtgggcactgga

SEQ ID NO: 41800 - DNA, 53 bp, Artificial Sequence
  Description of Artificial Sequence: Synthetic gluten; 5' sequence and inner sequence
tagggaagagaaggacatatgatggacgacgatgaccggaatcaagcgtgtca

SEQ ID NO: 41801 - DNA, 53 bp, Artificial Sequence
  Description of Artificial Sequence: Synthetic gluten; 5' sequence and inner sequence
tagggaagagaaggacatatgatgtacgcaacgaaccgcaaggggatgtggac

SEQ ID NO: 41802 - DNA, 53 bp, Artificial Sequence
  Description of Artificial Sequence: Synthetic gluten; 5' sequence and inner sequence
tagggaagagaaggacatatgattgacgtgcaggataagaacatggcctgagc

SEQ ID NO: 41803 - DNA, 53 bp, Artificial Sequence
  Description of Artificial Sequence: Synthetic gluten; 5' sequence and inner sequence
tagggaagagaaggacatatgatccgactcggaaaggtacgtacggagattca

SEQ ID NO: 41804 - DNA, 53 bp, Artificial Sequence; identical to SEQ ID NO: 1684
  Description of Artificial Sequence: Synthetic gluten; 5' sequence and inner sequence

SEQ ID NO: 41805 - DNA, 53 bp, Artificial Sequence
  Description of Artificial Sequence: Synthetic gluten; 5' sequence and inner sequence
tagggaagagaaggacatatgatccgatcgacctcgtgtcaggtgcacagtca

SEQ ID NO: 41806 - DNA, 53 bp, Artificial Sequence
  Description of Artificial Sequence: Synthetic gluten; 5' sequence and inner sequence
tagggaagagaaggacatatgattcatgccctgaacgctaatggacgacggga

SEQ ID NO: 41807 - DNA, 53 bp, Artificial Sequence
  Description of Artificial Sequence: Synthetic gluten; 5' sequence and inner sequence
tagggaagagaaggacatatgatcgcaccagcgatatgttgattagtacatcc

SEQ ID NO: 41808 - DNA, 53 bp, Artificial Sequence
  Description of Artificial Sequence: Synthetic gluten; 5' sequence and inner sequence
tagggaagagaaggacatatgatagtgatcacaaagagcagacttgggcatct

SEQ ID NO: 41809 - DNA, 53 bp, Artificial Sequence
  Description of Artificial Sequence: Synthetic gluten; 5' sequence and inner sequence
tagggaagagaaggacatatgatacgaacagagccgaagagccttaagcaagc

SEQ ID NO: 41810 - DNA, 53 bp, Artificial Sequence
  Description of Artificial Sequence: Synthetic gluten; 5' sequence and inner sequence
tagggaagagaaggacatatgatgcgcagcagcagtagtcatgctctgggatg

SEQ ID NO: 41811 - DNA, 53 bp, Artificial Sequence
  Description of Artificial Sequence: Synthetic gluten; 5' sequence and inner sequence
tagggaagagaaggacatatgattggccgacgattcccgttggacgaggcctt

SEQ ID NO: 41812 - DNA, 53 bp, Artificial Sequence
  Description of Artificial Sequence: Synthetic gluten; 5' sequence and inner sequence
tagggaagagaaggacatatgattcaacgtatgcctgaagaggacgcacaagg

SEQ ID NO: 41813 - DNA, 52 bp, Artificial Sequence; identical to SEQ ID NO: 29887
  Description of Artificial Sequence: Synthetic gluten; 5' sequence and inner sequence

SEQ ID NO: 41814 - DNA, 53 bp, Artificial Sequence
  Description of Artificial Sequence: Synthetic gluten; 5' sequence and inner sequence
tagggaagagaaggacatatgattcgagcacagatagagcatatggcacgatc

SEQ ID NO: 41815 - DNA, 53 bp, Artificial Sequence
  Description of Artificial Sequence: Synthetic gluten; 5' sequence and inner sequence
tagggaagagaaggacatatgatggacagaacgaccgatcaagtgcgggtgta

SEQ ID NO: 41816 - DNA, 53 bp, Artificial Sequence
  Description of Artificial Sequence: Synthetic gluten; 5' sequence and inner sequence
tagggaagagaaggacatatgatgcacaagtcgccagtctgatccgagctcac

SEQ ID NO: 41817 - DNA, 53 bp, Artificial Sequence
  Description of Artificial Sequence: Synthetic gluten; 5' sequence and inner sequence
tagggaagagaaggacatatgatccgagcggaaactgaattccatgcagtgtc

SEQ ID NO: 41818 - DNA, 53 bp, Artificial Sequence
  Description of Artificial Sequence: Synthetic gluten; 5' sequence and inner sequence
tagggaagagaaggacatatgatccgaacgtacctgagaagcatagtccgatc

SEQ ID NO: 41819 - DNA, 53 bp, Artificial Sequence
  Description of Artificial Sequence: Synthetic gluten; 5' sequence and inner sequence
tagggaagagaaggacatatgatcgtcagcatgacgaagatttgagccggaga

SEQ ID NO: 41820 - DNA, 53 bp, Artificial Sequence
  Description of Artificial Sequence: Synthetic gluten; 5' sequence and inner sequence
tagggaagagaaggacatatgatgaactgcgatggaatgggctgtatgcgtct

SEQ ID NO: 41821 - DNA, 53 bp, Artificial Sequence
  Description of Artificial Sequence: Synthetic gluten; 5' sequence and inner sequence
tagggaagagaaggacatatgatcatgtacataccgagacaatcttgttcata

SEQ ID NO: 41822 - DNA, 53 bp, Artificial Sequence
  Description of Artificial Sequence: Synthetic gluten; 5' sequence and inner sequence
tagggaagagaaggacatatgatggcatgcgatgcactacaagttgttgtgta

SEQ ID NO: 41823 - DNA, 53 bp, Artificial Sequence
  Description of Artificial Sequence: Synthetic gluten; 5' sequence and inner sequence
tagggaagagaaggacatatgatccgaacgcgcccttcaagtgcatggctgtc

SEQ ID NO: 41824 - DNA, 53 bp, Artificial Sequence
  Description of Artificial Sequence: Synthetic gluten; 5' sequence and inner sequence
tagggaagagaaggacatatgatggcctgatcgaacctcaagctggacatgga

SEQ ID NO: 41825 - DNA, 53 bp, Artificial Sequence
  Description of Artificial Sequence: Synthetic gluten; 5' sequence and inner sequence
tagggaagagaaggacatatgatggcctgagctgcactagtagagtcaaatta

SEQ ID NO: 41826 - DNA, 53 bp, Artificial Sequence
  Description of Artificial Sequence: Synthetic gluten; 5' sequence and inner sequence
tagggaagagaaggacatatgatcgtaccgcaagtgacgtgtccgtgccggga

SEQ ID NO: 41827 - DNA, 53 bp, Artificial Sequence
  Description of Artificial Sequence: Synthetic gluten; 5' sequence and inner sequence
tagggaagagaaggacatatgatcctgagcgaccgtagacctgtctagacaca

SEQ ID NO: 41828 - DNA, 53 bp, Artificial Sequence; identical to SEQ ID NO: 5721
  Description of Artificial Sequence: Synthetic gluten; 5' sequence and inner sequence

SEQ ID NO: 41829 - DNA, 53 bp, Artificial Sequence
  Description of Artificial Sequence: Synthetic gluten; 5' sequence and inner sequence
tagggaagagaaggacatatgatggacgcaacgtaccgcatcgtggccatgtg

SEQ ID NO: 41830 - DNA, 53 bp, Artificial Sequence
  Description of Artificial Sequence: Synthetic gluten; 5' sequence and inner sequence
tagggaagagaaggacatatgatccgcacagggcattgaaaatctcctacggc

SEQ ID NO: 41831 - DNA, 53 bp, Artificial Sequence
  Description of Artificial Sequence: Synthetic gluten; 5' sequence and inner sequence
tagggaagagaaggacatatgatggccgatgctgcactagtctcaagttgtca

SEQ ID NO: 41832 - DNA, 53 bp, Artificial Sequence; identical to SEQ ID NO: 5616
  Description of Artificial Sequence: Synthetic gluten; 5' sequence and inner sequence

SEQ ID NO: 41833 - DNA, 53 bp, Artificial Sequence
  Description of Artificial Sequence: Synthetic gluten; 5' sequence and inner sequence
tagggaagagaaggacatatgatggccgaagcttccctattcgtacggcagca

SEQ ID NO: 41834 - DNA, 53 bp, Artificial Sequence
  Description of Artificial Sequence: Synthetic gluten; 5' sequence and inner sequence
tagggaagagaaggacatatgattggccggatctgacctgtccctagttgcga

SEQ ID NO: 41835 - DNA, 53 bp, Artificial Sequence
  Description of Artificial Sequence: Synthetic gluten; 5' sequence and inner sequence
tagggaagagaaggacatatgatgtcatgcgcggacattccagttggcgtgga

SEQ ID NO: 41836 - DNA, 53 bp, Artificial Sequence; identical to SEQ ID NO: 5713
  Description of Artificial Sequence: Synthetic gluten; 5' sequence and inner sequence

SEQ ID NO: 41837 - DNA, 53 bp, Artificial Sequence
  Description of Artificial Sequence: Synthetic gluten; 5' sequence and inner sequence
tagggaagagaaggacatatgatcgtaccgcaagtgacgtgtccgagccgtga

SEQ ID NO: 41838 - DNA, 53 bp, Artificial Sequence
  Description of Artificial Sequence: Synthetic gluten; 5' sequence and inner sequence
tagggaagagaaggacatatgatccacatgccgtatcggtttgcggactaaca

SEQ ID NO: 41839 - DNA, 53 bp, Artificial Sequence
  Description of Artificial Sequence: Synthetic gluten; 5' sequence and inner sequence
tagggaagagaaggacatatgattggcctgctcgacctgtatcaggcactagg

SEQ ID NO: 41840 - DNA, 53 bp, Artificial Sequence
  Description of Artificial Sequence: Synthetic gluten; 5' sequence and inner sequence
tagggaagagaaggacatatgatggactgaacgaccgaattacgcttgtcaca

SEQ ID NO: 41841 - DNA, 53 bp, Artificial Sequence
  Description of Artificial Sequence: Synthetic gluten; 5' sequence and inner sequence
tagggaagagaaggacatatgatggactgcgcgtgacctatcaatggcatgca

SEQ ID NO: 41842 - DNA, 53 bp, Artificial Sequence
  Description of Artificial Sequence: Synthetic gluten; 5' sequence and inner sequence
tagggaagagaaggacatatgatgtacgcacgctgagcgccaagtgacatgga

SEQ ID NO: 41843 - DNA, 53 bp, Artificial Sequence
  Description of Artificial Sequence: Synthetic gluten; 5' sequence and inner sequence
tagggaagagaaggacatatgatggaacgcacgaagccctgtactaaggcaaa

SEQ ID NO: 41844 - DNA, 53 bp, Artificial Sequence
  Description of Artificial Sequence: Synthetic gluten; 5' sequence and inner sequence
tagggaagagaaggacatatgatcgtaccgcaagtgacgagtccgtgccgtga

SEQ ID NO: 41845 - DNA, 53 bp, Artificial Sequence; identical to SEQ ID NO: 5700
  Description of Artificial Sequence: Synthetic gluten; 5' sequence and inner sequence

SEQ ID NO: 41846 - DNA, 53 bp, Artificial Sequence
  Description of Artificial Sequence: Synthetic gluten; 5' sequence and inner sequence
tagggaagagaaggacatatgatccgtaccgtcgcaagtgctatcttccgatc

SEQ ID NO: 41847 - DNA, 53 bp, Artificial Sequence
  Description of Artificial Sequence: Synthetic gluten; 5' sequence and inner sequence
tagggaagagaaggacatatgatcgaagcatgtcaagagccgaagacaccata

SEQ ID NO: 41848 - DNA, 53 bp, Artificial Sequence
  Description of Artificial Sequence: Synthetic gluten; 5' sequence and inner sequence
tagggaagagaaggacatatgatgacagcggagcgggagcacaagagtggcat

SEQ ID NO: 41849 - DNA, 53 bp, Artificial Sequence
  Description of Artificial Sequence: Synthetic gluten; 5' sequence and inner sequence
tagggaagagaaggacatatgatggcatgcgatctcactatcaagtgttggca

SEQ ID NO: 41850 - DNA, 53 bp, Artificial Sequence
  Description of Artificial Sequence: Synthetic gluten; 5' sequence and inner sequence
tagggaagagaaggacatatgatggccacgcctgccctaccagtgctcatgga

SEQ ID NO: 41851 - DNA, 53 bp, Artificial Sequence
  Description of Artificial Sequence: Synthetic gluten; 5' sequence and inner sequence
tagggaagagaaggacatatgattcagatggcctcatcgtcactatctagtca

SEQ ID NO: 41852 - DNA, 53 bp, Artificial Sequence; identical to SEQ ID NO: 1164
  Description of Artificial Sequence: Synthetic gluten; 5' sequence and inner sequence

SEQ ID NO: 41853 - DNA, 53 bp, Artificial Sequence
  Description of Artificial Sequence: Synthetic gluten; 5' sequence and inner sequence
tagggaagagaaggacatatgatcgaacgacctaaacgtcagaataggcagta

SEQ ID NO: 41854 - DNA, 53 bp, Artificial Sequence
  Description of Artificial Sequence: Synthetic gluten; 5' sequence and inner sequence
tagggaagagaaggacatatgattgagatcaccgcaagacaaggggacggcga

SEQ ID NO: 41855 - DNA, 53 bp, Artificial Sequence
  Description of Artificial Sequence: Synthetic gluten; 5' sequence and inner sequence
tagggaagagaaggacatatgatggccgaactcgtccccttaacgtacgtggc

SEQ ID NO: 41856 - DNA, 53 bp, Artificial Sequence
  Description of Artificial Sequence: Synthetic gluten; 5' sequence and inner sequence
tagggaagagaaggacatatgataatatggccgccgaggaagtactatcaatg

SEQ ID NO: 41857 - DNA, 53 bp, Artificial Sequence
  Description of Artificial Sequence: Synthetic gluten; 5' sequence and inner sequence
tagggaagagaaggacatatgattgtccgacacttcacgctgagatcgtactg

SEQ ID NO: 41858 - DNA, 53 bp, Artificial Sequence
  Description of Artificial Sequence: Synthetic gluten; 5' sequence and inner sequence
tagggaagagaaggacatatgataccgtcatgcgaaagtcatatctcggcccg

SEQ ID NO: 41859 - DNA, 53 bp, Artificial Sequence; identical to SEQ ID NO: 37602
  Description of Artificial Sequence: Synthetic gluten; 5' sequence and inner sequence

SEQ ID NO: 41860 - DNA, 53 bp, Artificial Sequence
  Description of Artificial Sequence: Synthetic gluten; 5' sequence and inner sequence
tagggaagagaaggacatatgatcgtatggtcgagcgtaccttcaaggagtca

SEQ ID NO: 41861 - DNA, 53 bp, Artificial Sequence
  Description of Artificial Sequence: Synthetic gluten; 5' sequence and inner sequence
tagggaagagaaggacatatgatcatgacgtgtgaagcagccatgctgtcata

SEQ ID NO: 41862 - DNA, 53 bp, Artificial Sequence
  Description of Artificial Sequence: Synthetic gluten; 5' sequence and inner sequence
tagggaagagaaggacatatgatcctgatcaggcatagatgaccggcaacgga

SEQ ID NO: 41863 - DNA, 52 bp, Artificial Sequence
  Description of Artificial Sequence: Synthetic gluten; 5' sequence and inner sequence
tagggaagagaaggacatatgatccgtatcgtaccgtacatgtgcgtatcaa

SEQ ID NO: 41864 - DNA, 53 bp, Artificial Sequence
  Description of Artificial Sequence: Synthetic gluten; 5' sequence and inner sequence
tagggaagagaaggacatatgatcctgaacggccctacagagcgtacgaagca

SEQ ID NO: 41865 - DNA, 52 bp, Artificial Sequence
  Description of Artificial Sequence: Synthetic gluten; 5' sequence and inner sequence
tagggaagagaaggacatatgattgacctgagctgaacgaagaccgctagtc

SEQ ID NO: 41866 - DNA, 53 bp, Artificial Sequence
  Description of Artificial Sequence: Synthetic gluten; 5' sequence and inner sequence
tagggaagagaaggacatatgatcgtgacaaacaaggatctaccagcttcgcc

SEQ ID NO: 41867 - DNA, 53 bp, Artificial Sequence
  Description of Artificial Sequence: Synthetic gluten; 5' sequence and inner sequence
tagggaagagaaggacatatgattgtccagatcgacctacatgtctaggcaat

SEQ ID NO: 41868 - DNA, 53 bp, Artificial Sequence
  Description of Artificial Sequence: Synthetic gluten; 5' sequence and inner sequence
tagggaagagaaggacatatgattggccgactgacctagcagagcatggcatc

SEQ ID NO: 41869 - DNA, 53 bp, Artificial Sequence; identical to SEQ ID NO: 37927
  Description of Artificial Sequence: Synthetic gluten; 5' sequence and inner sequence

SEQ ID NO: 41870 - DNA, 53 bp, Artificial Sequence; identical to SEQ ID NO: 1097
  Description of Artificial Sequence: Synthetic gluten; 5' sequence and inner sequence

SEQ ID NO: 41871 - DNA, 53 bp, Artificial Sequence
  Description of Artificial Sequence: Synthetic gluten; 5' sequence and inner sequence
tagggaagagaaggacatatgatctgagccgaagatcctgtctttactcatga

SEQ ID NO: 41872 - DNA, 53 bp, Artificial Sequence; identical to SEQ ID NO: 37514
  Description of Artificial Sequence: Synthetic gluten; 5' sequence and inner sequence

SEQ ID NO: 41873 - DNA, 53 bp, Artificial Sequence
  Description of Artificial Sequence: Synthetic gluten; 5' sequence and inner sequence
tagggaagagaaggacatatgatggacgacctggatgtgagcatgcatctagt

SEQ ID NO: 41874 - DNA, 53 bp, Artificial Sequence
  Description of Artificial Sequence: Synthetic gluten; 5' sequence and inner sequence
tagggaagagaaggacatatgatttggcatgcgatggaaggtcagctagttca

SEQ ID NO: 41875 - DNA, 53 bp, Artificial Sequence
  Description of Artificial Sequence: Synthetic gluten; 5' sequence and inner sequence
tagggaagagaaggacatatgatttggcctgagctgaactgttaaatgtgtgt

SEQ ID NO: 41876 - DNA, 53 bp, Artificial Sequence
  Description of Artificial Sequence: Synthetic gluten; 5' sequence and inner sequence
tagggaagagaaggacatatgatcgcatagggccgagacagctacgactagtg

SEQ ID NO: 41877 - DNA, 53 bp, Artificial Sequence; identical to SEQ ID NO: 5798
  Description of Artificial Sequence: Synthetic gluten; 5' sequence and inner sequence

SEQ ID NO: 41878 - DNA, 53 bp, Artificial Sequence
  Description of Artificial Sequence: Synthetic gluten; 5' sequence and inner sequence
tagggaagagaaggacatatgatccgacgatgaactatgtacttagtgtctga

SEQ ID NO: 41879 - DNA, 53 bp, Artificial Sequence
  Description of Artificial Sequence: Synthetic gluten; 5' sequence and inner sequence
tagggaagagaaggacatatgatcacatcaaataggcctgagcgtatggacta

SEQ ID NO: 41880 - DNA, 53 bp, Artificial Sequence
  Description of Artificial Sequence: Synthetic gluten; 5' sequence and inner sequence
tagggaagagaaggacatatgatgacgactcgaaccaaggaaatggactgggc

SEQ ID NO: 41881 - DNA, 53 bp, Artificial Sequence
  Description of Artificial Sequence: Synthetic gluten; 5' sequence and inner sequence
tagggaagagaaggacatatgatgctccagatcgcaccttcaagttcggcatg

SEQ ID NO: 41882 - DNA, 53 bp, Artificial Sequence
  Description of Artificial Sequence: Synthetic gluten; 5' sequence and inner sequence
tagggaagagaaggacatatgattggcctgagcgaccacatgtctgtcaatcg

SEQ ID NO: 41883 - DNA, 53 bp, Artificial Sequence
  Description of Artificial Sequence: Synthetic gluten; 5' sequence and inner sequence
tagggaagagaaggacatatgatcgtaacgtcggtaaccttgaagcggtaagt

SEQ ID NO: 41884 - DNA, 53 bp, Artificial Sequence; identical to SEQ ID NO: 1635
  Description of Artificial Sequence: Synthetic gluten; 5' sequence and inner sequence

SEQ ID NO: 41885 - DNA, 53 bp, Artificial Sequence
  Description of Artificial Sequence: Synthetic gluten; 5' sequence and inner sequence
tagggaagagaaggacatatgattcgtaccgtcaaagtgcttggatcttcagg

SEQ ID NO: 41886 - DNA, 53 bp, Artificial Sequence
  Description of Artificial Sequence: Synthetic gluten; 5' sequence and inner sequence
tagggaagagaaggacatatgattggactgctattcacggcgagaatgtcaat

SEQ ID NO: 41887 - DNA, 52 bp, Artificial Sequence
  Description of Artificial Sequence: Synthetic gluten; 5' sequence and inner sequence
tagggaagagaaggacatatgatggcatgcgatggatgtggatggccagtct

SEQ ID NO: 41888 - DNA, 53 bp, Artificial Sequence; identical to SEQ ID NO: 5722
  Description of Artificial Sequence: Synthetic gluten; 5' sequence and inner sequence

SEQ ID NO: 41889 - DNA, 53 bp, Artificial Sequence
  Description of Artificial Sequence: Synthetic gluten; 5' sequence and inner sequence
tagggaagagaaggacatatgatccgaatcgacctcaagaacactgctcgacg

SEQ ID NO: 41890 - DNA, 53 bp, Artificial Sequence
  Description of Artificial Sequence: Synthetic gluten; 5' sequence and inner sequence
tagggaagagaaggacatatgattggccgaagcttccctagagacggacgtat

SEQ ID NO: 41891 - DNA, 53 bp, Artificial Sequence
  Description of Artificial Sequence: Synthetic gluten; 5' sequence and inner sequence
tagggaagagaaggacatatgatcgaccgacaaacactaattggcatcggggt

SEQ ID NO: 41892 - DNA, 53 bp, Artificial Sequence
  Description of Artificial Sequence: Synthetic gluten; 5' sequence and inner sequence
tagggaagagaaggacatatgatatgcctgcgatgaccgtggcatgcactata

SEQ ID NO: 41893 - DNA, 53 bp, Artificial Sequence
  Description of Artificial Sequence: Synthetic gluten; 5' sequence and inner sequence
tagggaagagaaggacatatgattgagcaacgcgaagaatagggctgttcgaa

SEQ ID NO: 41894 - DNA, 53 bp, Artificial Sequence
  Description of Artificial Sequence: Synthetic gluten; 5' sequence and inner sequence
tagggaagagaaggacatatgatgtacgtcgacagacctcaagttggcgtgta

SEQ ID NO: 41895 - DNA, 53 bp, Artificial Sequence
  Description of Artificial Sequence: Synthetic gluten; 5' sequence and inner sequence
tagggaagagaaggacatatgattgtcatgcgatgaactggcgtggtccttgc

SEQ ID NO: 41896 - DNA, 53 bp, Artificial Sequence
  Description of Artificial Sequence: Synthetic gluten; 5' sequence and inner sequence
tagggaagagaaggacatatgatcctgctcgaccgtcaagtgaaatggcgctg

SEQ ID NO: 41897 - DNA, 52 bp, Artificial Sequence
  Description of Artificial Sequence: Synthetic gluten; 5' sequence and inner sequence
tagggaagagaaggacatatgatctatcacatggcctgcctacttactgtca

SEQ ID NO: 41898 - DNA, 53 bp, Artificial Sequence
  Description of Artificial Sequence: Synthetic gluten; 5' sequence and inner sequence
tagggaagagaaggacatatgatcatccccaacgatcggcatatggcattcga

SEQ ID NO: 41899 - DNA, 53 bp, Artificial Sequence; identical to SEQ ID NO: 29272
  Description of Artificial Sequence: Synthetic gluten; 5' sequence and inner sequence

SEQ ID NO: 41900 - DNA, 53 bp, Artificial Sequence
  Description of Artificial Sequence: Synthetic gluten; 5' sequence and inner sequence
tagggaagagaaggacatatgatacattgccgcaatgggaatatgaactgcgc

SEQ ID NO: 41901 - DNA, 53 bp, Artificial Sequence
  Description of Artificial Sequence: Synthetic gluten; 5' sequence and inner sequence
tagggaagagaaggacatatgatagcaactcactacaagatcatttccgccgg

SEQ ID NO: 41902 - DNA, 53 bp, Artificial Sequence
  Description of Artificial Sequence: Synthetic gluten; 5' sequence and inner sequence
tagggaagagaaggacatatgatcgatgaggcgaagcaatctgacggggtcaa

SEQ ID NO: 41903 - DNA, 53 bp, Artificial Sequence
  Description of Artificial Sequence: Synthetic gluten; 5' sequence and inner sequence
tagggaagagaaggacatatgatggcctgatcgaacctagagagtggcgggga

SEQ ID NO: 41904 - DNA, 53 bp, Artificial Sequence
  Description of Artificial Sequence: Synthetic gluten; 5' sequence and inner sequence
tagggaagagaaggacatatgatcagatggccgaagctgcactacatgtggac

SEQ ID NO: 41905 - DNA, 53 bp, Artificial Sequence
  Description of Artificial Sequence: Synthetic gluten; 5' sequence and inner sequence
tagggaagagaaggacatatgatcgacctgggtgaaccgaagatgctgtcaca

SEQ ID NO: 41906 - DNA, 53 bp, Artificial Sequence
  Description of Artificial Sequence: Synthetic gluten; 5' sequence and inner sequence
tagggaagagaaggacatatgatggcctgcgctggaatgtgcgaatgtacgca

SEQ ID NO: 41907 - DNA, 49 bp, Artificial Sequence
  Description of Artificial Sequence: Synthetic gluten; 5' sequence and inner sequence
tagggaagagaaggacatatgatggcattcgatgcactacaagtcgtca

SEQ ID NO: 41908 - DNA, 53 bp, Artificial Sequence
  Description of Artificial Sequence: Synthetic gluten; 5' sequence and inner sequence
tagggaagagaaggacatatgatggcctgatcgaacctagagtgtggcgtgga

SEQ ID NO: 41909 - DNA, 53 bp, Artificial Sequence
  Description of Artificial Sequence: Synthetic gluten; 5' sequence and inner sequence
tagggaagagaaggacatatgatggcatgacgcattccctaaagtggcaggta

SEQ ID NO: 41910 - DNA, 53 bp, Artificial Sequence
  Description of Artificial Sequence: Synthetic gluten; 5' sequence and inner sequence
tagggaagagaaggacatatgatggcctgatcgaacctagagagtggtgtgga

SEQ ID NO: 41911 - DNA, 53 bp, Artificial Sequence
  Description of Artificial Sequence: Synthetic gluten; 5' sequence and inner sequence
tagggaagagaaggacatatgatggccgacgatggatgtggatgtattggtct

SEQ ID NO: 41912 - DNA, 53 bp, Artificial Sequence; identical to SEQ ID NO: 37504
  Description of Artificial Sequence: Synthetic gluten; 5' sequence and inner sequence

SEQ ID NO: 41913 - DNA, 53 bp, Artificial Sequence
  Description of Artificial Sequence: Synthetic gluten; 5' sequence and inner sequence
tagggaagagaaggacatatgatgccagcagaggacttcaaggtgagtacata

SEQ ID NO: 41914 - DNA, 53 bp, Artificial Sequence
  Description of Artificial Sequence: Synthetic gluten; 5' sequence and inner sequence
tagggaagagaaggacatatgatagaactcgtgtacgtggagagagatccgga

SEQ ID NO: 41915 - DNA, 53 bp, Artificial Sequence
  Description of Artificial Sequence: Synthetic gluten; 5' sequence and inner sequence
tagggaagagaaggacatatgatacgcaccacgatgaggatccgctcttcacg

SEQ ID NO: 41916 - DNA, 53 bp, Artificial Sequence
  Description of Artificial Sequence: Synthetic gluten; 5' sequence and inner sequence
tagggaagagaaggacatatgatggcatgcgctgggtagtgatcacgtacggg

SEQ ID NO: 41917 - DNA, 53 bp, Artificial Sequence
  Description of Artificial Sequence: Synthetic gluten; 5' sequence and inner sequence
tagggaagagaaggacatatgatgtcatgatcggatgtggatgtggactcgac

SEQ ID NO: 41918 - DNA, 53 bp, Artificial Sequence; identical to SEQ ID NO: 5688
  Description of Artificial Sequence: Synthetic gluten; 5' sequence and inner sequence

SEQ ID NO: 41919 - DNA, 53 bp, Artificial Sequence
  Description of Artificial Sequence: Synthetic gluten; 5' sequence and inner sequence
tagggaagagaaggacatatgatgtacgacgcggaccttcaagtaggcgcgta

SEQ ID NO: 41920 - DNA, 53 bp, Artificial Sequence
  Description of Artificial Sequence: Synthetic gluten; 5' sequence and inner sequence
tagggaagagaaggacatatgatggcattcgatgcactacaagttgttgtgca

SEQ ID NO: 41921 - DNA, 53 bp, Artificial Sequence; identical to SEQ ID NO: 5710
  Description of Artificial Sequence: Synthetic gluten; 5' sequence and inner sequence

SEQ ID NO: 41922 - DNA, 53 bp, Artificial Sequence
  Description of Artificial Sequence: Synthetic gluten; 5' sequence and inner sequence
tagggaagagaaggacatatgatccaatcgaccgcgtggacttgcactgggcc

SEQ ID NO: 41923 - DNA, 53 bp, Artificial Sequence
  Description of Artificial Sequence: Synthetic gluten; 5' sequence and inner sequence
tagggaagagaaggacatatgatggcatgacgcgaccccttcaagctgtgtca

SEQ ID NO: 41924 - DNA, 53 bp, Artificial Sequence
  Description of Artificial Sequence: Synthetic gluten; 5' sequence and inner sequence
tagggaagagaaggacatatgattccatcacaggtccggagaacggctacgac

SEQ ID NO: 41925 - DNA, 53 bp, Artificial Sequence
  Description of Artificial Sequence: Synthetic gluten; 5' sequence and inner sequence
tagggaagagaaggacatatgatcgacagagcgaatggcaatctccagtcaca

SEQ ID NO: 41926 - DNA, 53 bp, Artificial Sequence
  Description of Artificial Sequence: Synthetic gluten; 5' sequence and inner sequence
tagggaagagaaggacatatgattaatccaagatgcagcagatggacgacctc

SEQ ID NO: 41927 - DNA, 53 bp, Artificial Sequence
  Description of Artificial Sequence: Synthetic gluten; 5' sequence and inner sequence
tagggaagagaaggacatatgatggccgatcgtacctggtgatgtgcgtatcc

SEQ ID NO: 41928 - DNA, 53 bp, Artificial Sequence; identical to SEQ ID NO: 1972
  Description of Artificial Sequence: Synthetic gluten; 5' sequence and inner sequence

SEQ ID NO: 41929 - DNA, 53 bp, Artificial Sequence
  Description of Artificial Sequence: Synthetic gluten; 5' sequence and inner sequence
tagggaagagaaggacatatgatacgatctggacacagctgacaggaacgcaa

SEQ ID NO: 41930 - DNA, 53 bp, Artificial Sequence
  Description of Artificial Sequence: Synthetic gluten; 5' sequence and inner sequence
tagggaagagaaggacatatgatggccgtgggagaaactagcgctacgtacga

SEQ ID NO: 41931 - DNA, 53 bp, Artificial Sequence
  Description of Artificial Sequence: Synthetic gluten; 5' sequence and inner sequence
tagggaagagaaggacatatgatacttcgcgaccctagcatgctacgtacgtt

SEQ ID NO: 41932 - DNA, 53 bp, Artificial Sequence
  Description of Artificial Sequence: Synthetic gluten; 5' sequence and inner sequence
tagggaagagaaggacatatgattggcctgagcgaaactagtactagccatgc

SEQ ID NO: 41933 - DNA, 53 bp, Artificial Sequence
  Description of Artificial Sequence: Synthetic gluten; 5' sequence and inner sequence
tagggaagagaaggacatatgatcccatcagatggcctaatctgagtcaggca

SEQ ID NO: 41934 - DNA, 53 bp, Artificial Sequence
  Description of Artificial Sequence: Synthetic gluten; 5' sequence and inner sequence
tagggaagagaaggacatatgatggcccgactccctatcagtggcacgtacta

SEQ ID NO: 41935 - DNA, 53 bp, Artificial Sequence
  Description of Artificial Sequence: Synthetic gluten; 5' sequence and inner sequence
tagggaagagaaggacatatgatcgaaccagagagcagttctaggcaatctca

SEQ ID NO: 41936 - DNA, 53 bp, Artificial Sequence
  Description of Artificial Sequence: Synthetic gluten; 5' sequence and inner sequence
tagggaagagaaggacatatgatggcatgctctgaccgaacgtgctaatggct

SEQ ID NO: 41937 - DNA, 53 bp, Artificial Sequence
  Description of Artificial Sequence: Synthetic gluten; 5' sequence and inner sequence
tagggaagagaaggacatatgatcatggcgaagggggcagtcacctgctcata

SEQ ID NO: 41938 - DNA, 53 bp, Artificial Sequence
  Description of Artificial Sequence: Synthetic gluten; 5' sequence and inner sequence
tagggaagagaaggacatatgatggcccgaatcccttcaagatgggcgatgga

SEQ ID NO: 41939 - DNA, 53 bp, Artificial Sequence
  Description of Artificial Sequence: Synthetic gluten; 5' sequence and inner sequence
tagggaagagaaggacatatgatacttctcggaacggcatgtgaatcgtcgaa

SEQ ID NO: 41940 - DNA, 53 bp, Artificial Sequence
  Description of Artificial Sequence: Synthetic gluten; 5' sequence and inner sequence
tagggaagagaaggacatatgatcctcatacggccgactctgagtgcaagtta

SEQ ID NO: 41941 - DNA, 53 bp, Artificial Sequence
  Description of Artificial Sequence: Synthetic gluten; 5' sequence and inner sequence
tagggaagagaaggacatatgattcacagcatggtggatttgcaaaccctcaa

SEQ ID NO: 41942 - DNA, 53 bp, Artificial Sequence
  Description of Artificial Sequence: Synthetic gluten; 5' sequence and inner sequence
tagggaagagaaggacatatgattgcaacgcggcttgcttcctactaccgtcc

SEQ ID NO: 41943 - DNA, 53 bp, Artificial Sequence
  Description of Artificial Sequence: Synthetic gluten; 5' sequence and inner sequence
tagggaagagaaggacatatgatggcctgcgatgaccgtcaagctaacttgcg

SEQ ID NO: 41944 - DNA, 53 bp, Artificial Sequence
  Description of Artificial Sequence: Synthetic gluten; 5' sequence and inner sequence
tagggaagagaaggacatatgatccgattgacataccgaccggatcagcatga

SEQ ID NO: 41945 - DNA, 53 bp, Artificial Sequence
  Description of Artificial Sequence: Synthetic gluten; 5' sequence and inner sequence
tagggaagagaaggacatatgattgactgaacgaaccgtccatgaacgtaggt

SEQ ID NO: 41946 - DNA, 53 bp, Artificial Sequence
  Description of Artificial Sequence: Synthetic gluten; 5' sequence and inner sequence
tagggaagagaaggacatatgatgctccgacgatggaaggacgtggcagtcaa

SEQ ID NO: 41947 - DNA, 53 bp, Artificial Sequence
  Description of Artificial Sequence: Synthetic gluten; 5' sequence and inner sequence
tagggaagagaaggacatatgatacatggcctgaacgaaatcgacggcacttg

SEQ ID NO: 41948 - DNA, 53 bp, Artificial Sequence
  Description of Artificial Sequence: Synthetic gluten; 5' sequence and inner sequence
tagggaagagaaggacatatgatgatgagccgaagagagggaaatagggacta

SEQ ID NO: 41949 - DNA, 53 bp, Artificial Sequence
  Description of Artificial Sequence: Synthetic gluten; 5' sequence and inner sequence
tagggaagagaaggacatatgatcgtcctgagctgaccgtctgtctctggcat

SEQ ID NO: 41950 - DNA, 53 bp, Artificial Sequence
  Description of Artificial Sequence: Synthetic gluten; 5' sequence and inner sequence
tagggaagagaaggacatatgatgaactgaacgcaccgttttctaggcaagca

SEQ ID NO: 41951 - DNA, 53 bp, Artificial Sequence; identical to SEQ ID NO: 5925
  Description of Artificial Sequence: Synthetic gluten; 5' sequence and inner sequence

SEQ ID NO: 41952 - DNA, 53 bp, Artificial Sequence
  Description of Artificial Sequence: Synthetic gluten; 5' sequence and inner sequence
tagggaagagaaggacatatgatggcctgatcgaacctagagagcggcgtggg

SEQ ID NO: 41953 - DNA, 53 bp, Artificial Sequence
  Description of Artificial Sequence: Synthetic gluten; 5' sequence and inner sequence
tagggaagagaaggacatatgatcgcaagccgtagtaaatcataccgagaggc

SEQ ID NO: 41954 - DNA, 53 bp, Artificial Sequence
  Description of Artificial Sequence: Synthetic gluten; 5' sequence and inner sequence
tagggaagagaaggacatatgatggcctgcgatggaatgagcgaatgtacgca

SEQ ID NO: 41955 - DNA, 53 bp, Artificial Sequence
  Description of Artificial Sequence: Synthetic gluten; 5' sequence and inner sequence
tagggaagagaaggacatatgatcatgtggccgactgaactagcaagctggtc

SEQ ID NO: 41956 - DNA, 53 bp, Artificial Sequence
  Description of Artificial Sequence: Synthetic gluten; 5' sequence and inner sequence
tagggaagagaaggacatatgatcgaaccgctgtatgctcaacgtatggtggt

SEQ ID NO: 41957 - DNA, 53 bp, Artificial Sequence
  Description of Artificial Sequence: Synthetic gluten; 5' sequence and inner sequence
tagggaagagaaggacatatgatggcattcgatgcactacacgttgttgtgta

SEQ ID NO: 41958 - DNA, 53 bp, Artificial Sequence
  Description of Artificial Sequence: Synthetic gluten; 5' sequence and inner sequence
tagggaagagaaggacatatgattacgcaacgaccctatcgagaggacatgta

SEQ ID NO: 41959 - DNA, 53 bp, Artificial Sequence
  Description of Artificial Sequence: Synthetic gluten; 5' sequence and inner sequence
tagggaagagaaggacatatgatgcttgagccgaagaccctacaatcagatga

SEQ ID NO: 41960 - DNA, 52 bp, Artificial Sequence
  Description of Artificial Sequence: Synthetic gluten; 5' sequence and inner sequence
tagggaagagaaggacatatgattggacggaagaaagctactactggcagca

SEQ ID NO: 41961 - DNA, 53 bp, Artificial Sequence
  Description of Artificial Sequence: Synthetic gluten; 5' sequence and inner sequence
tagggaagagaaggacatatgatcatgactacacttgctcccaaagaggcata

SEQ ID NO: 41962 - DNA, 51 bp, Artificial Sequence
  Description of Artificial Sequence: Synthetic gluten; 5' sequence and inner sequence
tagggaagagaaggacatatgatgtacggaacgaacgtaatggacgacgta

SEQ ID NO: 41963 - DNA, 53 bp, Artificial Sequence; identical to SEQ ID NO: 1789
  Description of Artificial Sequence: Synthetic gluten; 5' sequence and inner sequence

SEQ ID NO: 41964 - DNA, 53 bp, Artificial Sequence
  Description of Artificial Sequence: Synthetic gluten; 5' sequence and inner sequence
tagggaagagaaggacatatgatcgactcgacccgaaagtaggcatgtggcta

SEQ ID NO: 41965 - DNA, 53 bp, Artificial Sequence
  Description of Artificial Sequence: Synthetic gluten; 5' sequence and inner sequence
tagggaagagaaggacatatgatggccgacgaggctgaaagtcatacgtgcta

SEQ ID NO: 41966 - DNA, 53 bp, Artificial Sequence
  Description of Artificial Sequence: Synthetic gluten; 5' sequence and inner sequence
tagggaagagaaggacatatgatgcgtcagcggcagagggactgatcaggtca

SEQ ID NO: 41967 - DNA, 53 bp, Artificial Sequence
  Description of Artificial Sequence: Synthetic gluten; 5' sequence and inner sequence
tagggaagagaaggacatatgatatggcatgcgatgaccacgtactgggcaat

SEQ ID NO: 41968 - DNA, 51 bp, Artificial Sequence; identical to SEQ ID NO: 1148
  Description of Artificial Sequence: Synthetic gluten; 5' sequence and inner sequence

SEQ ID NO: 41969 - DNA, 53 bp, Artificial Sequence
  Description of Artificial Sequence: Synthetic gluten; 5' sequence and inner sequence
tagggaagagaaggacatatgatcgagctcgccgagagccgaagacagtcaca

SEQ ID NO: 41970 - DNA, 53 bp, Artificial Sequence
  Description of Artificial Sequence: Synthetic gluten; 5' sequence and inner sequence
tagggaagagaaggacatatgatccgatcgacctacaaagagcctgtaatagc

SEQ ID NO: 41971 - DNA, 53 bp, Artificial Sequence
  Description of Artificial Sequence: Synthetic gluten; 5' sequence and inner sequence
tagggaagagaaggacatatgatccgatcgagcctaatagtagagcatgttac

SEQ ID NO: 41972 - DNA, 53 bp, Artificial Sequence; identical to SEQ ID NO: 1493
  Description of Artificial Sequence: Synthetic gluten; 5' sequence and inner sequence

SEQ ID NO: 41973 - DNA, 53 bp, Artificial Sequence
  Description of Artificial Sequence: Synthetic gluten; 5' sequence and inner sequence
tagggaagagaaggacatatgatcctgagccgaagatcacctgtcaagttaga

SEQ ID NO: 41974 - DNA, 53 bp, Artificial Sequence
  Description of Artificial Sequence: Synthetic gluten; 5' sequence and inner sequence
tagggaagagaaggacatatgatcatcatgtggccgaacagactagctgggca

SEQ ID NO: 41975 - DNA, 53 bp, Artificial Sequence
  Description of Artificial Sequence: Synthetic gluten; 5' sequence and inner sequence
tagggaagagaaggacatatgatggccgaatctgaccgctatcatgggatggc

SEQ ID NO: 41976 - DNA, 53 bp, Artificial Sequence
  Description of Artificial Sequence: Synthetic gluten; 5' sequence and inner sequence
tagggaagagaaggacatatgatcaacacacgaaggctagctattgactcacg

SEQ ID NO: 41977 - DNA, 53 bp, Artificial Sequence
  Description of Artificial Sequence: Synthetic gluten; 5' sequence and inner sequence
tagggaagagaaggacatatgatgtacgacgcggaccttcaagtaggcgtgca

SEQ ID NO: 41978 - DNA, 53 bp, Artificial Sequence; identical to SEQ ID NO: 21744
  Description of Artificial Sequence: Synthetic gluten; 5' sequence and inner sequence

SEQ ID NO: 41979 - DNA, 53 bp, Artificial Sequence
  Description of Artificial Sequence: Synthetic gluten; 5' sequence and inner sequence
tagggaagagaaggacatatgatccactcacatggacgtatctgagctatcga

SEQ ID NO: 41980 - DNA, 53 bp, Artificial Sequence
  Description of Artificial Sequence: Synthetic gluten; 5' sequence and inner sequence
tagggaagagaaggacatatgatggtctgatcgaacctagagagtggcgtgga

SEQ ID NO: 41981 - DNA, 53 bp, Artificial Sequence; identical to SEQ ID NO: 1991
  Description of Artificial Sequence: Synthetic gluten; 5' sequence and inner sequence

SEQ ID NO: 41982 - DNA, 53 bp, Artificial Sequence
  Description of Artificial Sequence: Synthetic gluten; 5' sequence and inner sequence
tagggaagagaaggacatatgatcacctctgacctgagcatgtgcgctgacga

SEQ ID NO: 41983 - DNA, 53 bp, Artificial Sequence
  Description of Artificial Sequence: Synthetic gluten; 5' sequence and inner sequence
tagggaagagaaggacatatgatggaacggagcggaactcattggatcttcga

SEQ ID NO: 41984 - DNA, 53 bp, Artificial Sequence
  Description of Artificial Sequence: Synthetic gluten; 5' sequence and inner sequence
tagggaagagaaggacatatgatggccgccctggatgtgagcatgcatctagt

SEQ ID NO: 41985 - DNA, 53 bp, Artificial Sequence
  Description of Artificial Sequence: Synthetic gluten; 5' sequence and inner sequence
tagggaagagaaggacatatgatacttcgatgcacctgtctatgtcgactagt

SEQ ID NO: 41986 - DNA, 53 bp, Artificial Sequence; identical to SEQ ID NO: 1044
  Description of Artificial Sequence: Synthetic gluten; 5' sequence and inner sequence

SEQ ID NO: 41987 - DNA, 53 bp, Artificial Sequence
  Description of Artificial Sequence: Synthetic gluten; 5' sequence and inner sequence
tagggaagagaaggacatatgatccgagcgacactaagctcatgataggcatt

SEQ ID NO: 41988 - DNA, 53 bp, Artificial Sequence
  Description of Artificial Sequence: Synthetic gluten; 5' sequence and inner sequence
tagggaagagaaggacatatgatcctgaacgcaccctaactaagaaacatgga

SEQ ID NO: 41989 - DNA, 53 bp, Artificial Sequence
  Description of Artificial Sequence: Synthetic gluten; 5' sequence and inner sequence
tagggaagagaaggacatatgatggtgctggcgaacgaccagacattgtgcta

SEQ ID NO: 41990 - DNA, 53 bp, Artificial Sequence
  Description of Artificial Sequence: Synthetic gluten; 5' sequence and inner sequence
tagggaagagaaggacatatgatcatgtacgcgatccccagcattaaggcata

SEQ ID NO: 41991 - DNA, 53 bp, Artificial Sequence
  Description of Artificial Sequence: Synthetic gluten; 5' sequence and inner sequence
tagggaagagaaggacatatgattggactgagcttcactaaaggtgggacgta

SEQ ID NO: 41992 - DNA, 53 bp, Artificial Sequence
  Description of Artificial Sequence: Synthetic gluten; 5' sequence and inner sequence
tagggaagagaaggacatatgattgtccgactcgaccatctggacaggcatac

SEQ ID NO: 41993 - DNA, 53 bp, Artificial Sequence
  Description of Artificial Sequence: Synthetic gluten; 5' sequence and inner sequence
tagggaagagaaggacatatgatgacgaactcgaaccgaagcaaggccggtca

SEQ ID NO: 41994 - DNA, 53 bp, Artificial Sequence
  Description of Artificial Sequence: Synthetic gluten; 5' sequence and inner sequence
tagggaagagaaggacatatgattgcctgatcgaacctagagagtggcgtgga

SEQ ID NO: 41995 - DNA, 53 bp, Artificial Sequence
  Description of Artificial Sequence: Synthetic gluten; 5' sequence and inner sequence
tagggaagagaaggacatatgattcgtaccgatcataggccggctagttcata

SEQ ID NO: 41996 - DNA, 53 bp, Artificial Sequence
  Description of Artificial Sequence: Synthetic gluten; 5' sequence and inner sequence
tagggaagagaaggacatatgatccgacgagtccctacaagctgcgtgtcata

SEQ ID NO: 41997 - DNA, 53 bp, Artificial Sequence
  Description of Artificial Sequence: Synthetic gluten; 5' sequence and inner sequence
tagggaagagaaggacatatgatccgatagaccagctactaactagcagcaga

SEQ ID NO: 41998 - DNA, 53 bp, Artificial Sequence
  Description of Artificial Sequence: Synthetic gluten; 5' sequence and inner sequence
tagggaagagaaggacatatgatcgcgcgaggttcctaacatcattcgcgagt

SEQ ID NO: 41999 - DNA, 53 bp, Artificial Sequence
  Description of Artificial Sequence: Synthetic gluten; 5' sequence and inner sequence
tagggaagagaaggacatatgatggcattcgatgaccgaccgtacgagagtca

SEQ ID NO: 42000 - DNA, 53 bp, Artificial Sequence; identical to SEQ ID NO: 37966
  Description of Artificial Sequence: Synthetic gluten; 5' sequence and inner sequence

SEQ ID NO: 42001 - DNA, 53 bp, Artificial Sequence
  Description of Artificial Sequence: Synthetic gluten; 5' sequence and inner sequence
tagggaagagaaggacatatgatgtccgacatgcccctcaatgtggacgtgga

SEQ ID NO: 42002 - DNA, 53 bp, Artificial Sequence
  Description of Artificial Sequence: Synthetic gluten; 5' sequence and inner sequence
tagggaagagaaggacatatgatcatgactcaccgggaacggccagtttcata

SEQ ID NO: 42003 - DNA, 53 bp, Artificial Sequence; identical to SEQ ID NO: 2024
  Description of Artificial Sequence: Synthetic gluten; inner sequence and 3'  sequence

SEQ ID NO: 42004 - DNA, 53 bp, Artificial Sequence; identical to SEQ ID NO: 2034
  Description of Artificial Sequence: Synthetic gluten; inner sequence and 3'  sequence

SEQ ID NO: 42005 - DNA, 53 bp, Artificial Sequence; identical to SEQ ID NO: 2040
  Description of Artificial Sequence: Synthetic gluten; inner sequence and 3'  sequence

SEQ ID NO: 42006 - DNA, 53 bp, Artificial Sequence; identical to SEQ ID NO: 2017
  Description of Artificial Sequence: Synthetic gluten; inner sequence and 3'  sequence

SEQ ID NO: 42007 - DNA, 53 bp, Artificial Sequence; identical to SEQ ID NO: 2464
  Description of Artificial Sequence: Synthetic gluten; inner sequence and 3'  sequence

SEQ ID NO: 42008 - DNA, 53 bp, Artificial Sequence; identical to SEQ ID NO: 2039
  Description of Artificial Sequence: Synthetic gluten; inner sequence and 3'  sequence

SEQ ID NO: 42009 - DNA, 53 bp, Artificial Sequence; identical to SEQ ID NO: 2008
  Description of Artificial Sequence: Synthetic gluten; inner sequence and 3'  sequence

SEQ ID NO: 42010 - DNA, 53 bp, Artificial Sequence; identical to SEQ ID NO: 2006
  Description of Artificial Sequence: Synthetic gluten; inner sequence and 3'  sequence

SEQ ID NO: 42011 - DNA, 53 bp, Artificial Sequence; identical to SEQ ID NO: 2631
  Description of Artificial Sequence: Synthetic gluten; inner sequence and 3'  sequence

SEQ ID NO: 42012 - DNA, 53 bp, Artificial Sequence; identical to SEQ ID NO: 2019
  Description of Artificial Sequence: Synthetic gluten; inner sequence and 3'  sequence

SEQ ID NO: 42013 - DNA, 53 bp, Artificial Sequence; identical to SEQ ID NO: 2010
  Description of Artificial Sequence: Synthetic gluten; inner sequence and 3'  sequence

SEQ ID NO: 42014 - DNA, 53 bp, Artificial Sequence; identical to SEQ ID NO: 2052
  Description of Artificial Sequence: Synthetic gluten; inner sequence and 3'  sequence

SEQ ID NO: 42015 - DNA, 53 bp, Artificial Sequence; identical to SEQ ID NO: 2074
  Description of Artificial Sequence: Synthetic gluten; inner sequence and 3'  sequence

SEQ ID NO: 42016 - DNA, 53 bp, Artificial Sequence; identical to SEQ ID NO: 2094
  Description of Artificial Sequence: Synthetic gluten; inner sequence and 3'  sequence

SEQ ID NO: 42017 - DNA, 53 bp, Artificial Sequence; identical to SEQ ID NO: 2139
  Description of Artificial Sequence: Synthetic gluten; inner sequence and 3'  sequence

SEQ ID NO: 42018 - DNA, 53 bp, Artificial Sequence; identical to SEQ ID NO: 2060
  Description of Artificial Sequence: Synthetic gluten; inner sequence and 3'  sequence

SEQ ID NO: 42019 - DNA, 53 bp, Artificial Sequence; identical to SEQ ID NO: 2116
  Description of Artificial Sequence: Synthetic gluten; inner sequence and 3'  sequence

SEQ ID NO: 42020 - DNA, 53 bp, Artificial Sequence; identical to SEQ ID NO: 2273
  Description of Artificial Sequence: Synthetic gluten; inner sequence and 3'  sequence

SEQ ID NO: 42021 - DNA, 53 bp, Artificial Sequence; identical to SEQ ID NO: 2022
  Description of Artificial Sequence: Synthetic gluten; inner sequence and 3'  sequence

SEQ ID NO: 42022 - DNA, 53 bp, Artificial Sequence; identical to SEQ ID NO: 2012
  Description of Artificial Sequence: Synthetic gluten; inner sequence and 3'  sequence

SEQ ID NO: 42023 - DNA, 53 bp, Artificial Sequence; identical to SEQ ID NO: 2027
  Description of Artificial Sequence: Synthetic gluten; inner sequence and 3'  sequence

SEQ ID NO: 42024 - DNA, 53 bp, Artificial Sequence; identical to SEQ ID NO: 2053
  Description of Artificial Sequence: Synthetic gluten; inner sequence and 3'  sequence

SEQ ID NO: 42025 - DNA, 53 bp, Artificial Sequence; identical to SEQ ID NO: 2047
  Description of Artificial Sequence: Synthetic gluten; inner sequence and 3'  sequence

SEQ ID NO: 42026 - DNA, 53 bp, Artificial Sequence; identical to SEQ ID NO: 2037
  Description of Artificial Sequence: Synthetic gluten; inner sequence and 3'  sequence

SEQ ID NO: 42027 - DNA, 53 bp, Artificial Sequence
  Description of Artificial Sequence: Synthetic gluten; inner sequence and 3'  sequence
catgtgcgaaccgagcttgtacaaggcatattgactagtacatgaccacttga

SEQ ID NO: 42028 - DNA, 53 bp, Artificial Sequence; identical to SEQ ID NO: 2059
  Description of Artificial Sequence: Synthetic gluten; inner sequence and 3'  sequence

SEQ ID NO: 42029 - DNA, 53 bp, Artificial Sequence; identical to SEQ ID NO: 2032
  Description of Artificial Sequence: Synthetic gluten; inner sequence and 3'  sequence

SEQ ID NO: 42030 - DNA, 53 bp, Artificial Sequence; identical to SEQ ID NO: 2058
  Description of Artificial Sequence: Synthetic gluten; inner sequence and 3'  sequence

SEQ ID NO: 42031 - DNA, 53 bp, Artificial Sequence; identical to SEQ ID NO: 6874
  Description of Artificial Sequence: Synthetic gluten; inner sequence and 3'  sequence

SEQ ID NO: 42032 - DNA, 53 bp, Artificial Sequence; identical to SEQ ID NO: 2308
  Description of Artificial Sequence: Synthetic gluten; inner sequence and 3'  sequence

SEQ ID NO: 42033 - DNA, 53 bp, Artificial Sequence; identical to SEQ ID NO: 2383
  Description of Artificial Sequence: Synthetic gluten; inner sequence and 3'  sequence

SEQ ID NO: 42034 - DNA, 53 bp, Artificial Sequence; identical to SEQ ID NO: 2377
  Description of Artificial Sequence: Synthetic gluten; inner sequence and 3'  sequence

SEQ ID NO: 42035 - DNA, 53 bp, Artificial Sequence; identical to SEQ ID NO: 2082
  Description of Artificial Sequence: Synthetic gluten; inner sequence and 3'  sequence

SEQ ID NO: 42036 - DNA, 53 bp, Artificial Sequence; identical to SEQ ID NO: 2238
  Description of Artificial Sequence: Synthetic gluten; inner sequence and 3'  sequence

SEQ ID NO: 42037 - DNA, 53 bp, Artificial Sequence; identical to SEQ ID NO: 2055
  Description of Artificial Sequence: Synthetic gluten; inner sequence and 3'  sequence

SEQ ID NO: 42038 - DNA, 52 bp, Artificial Sequence; identical to SEQ ID NO: 2193
  Description of Artificial Sequence: Synthetic gluten; inner sequence and 3'  sequence

SEQ ID NO: 42039 - DNA, 53 bp, Artificial Sequence; identical to SEQ ID NO: 2003
  Description of Artificial Sequence: Synthetic gluten; inner sequence and 3'  sequence

SEQ ID NO: 42040 - DNA, 53 bp, Artificial Sequence; identical to SEQ ID NO: 2128
  Description of Artificial Sequence: Synthetic gluten; inner sequence and 3'  sequence

SEQ ID NO: 42041 - DNA, 53 bp, Artificial Sequence; identical to SEQ ID NO: 6513
  Description of Artificial Sequence: Synthetic gluten; inner sequence and 3'  sequence

SEQ ID NO: 42042 - DNA, 53 bp, Artificial Sequence; identical to SEQ ID NO: 6814
  Description of Artificial Sequence: Synthetic gluten; inner sequence and 3'  sequence

SEQ ID NO: 42043 - DNA, 53 bp, Artificial Sequence; identical to SEQ ID NO: 2023
  Description of Artificial Sequence: Synthetic gluten; inner sequence and 3'  sequence

SEQ ID NO: 42044 - DNA, 50 bp, Artificial Sequence; identical to SEQ ID NO: 26993
  Description of Artificial Sequence: Synthetic gluten; inner sequence and 3'  sequence

SEQ ID NO: 42045 - DNA, 53 bp, Artificial Sequence; identical to SEQ ID NO: 2645
  Description of Artificial Sequence: Synthetic gluten; inner sequence and 3'  sequence

SEQ ID NO: 42046 - DNA, 53 bp, Artificial Sequence; identical to SEQ ID NO: 2005
  Description of Artificial Sequence: Synthetic gluten; inner sequence and 3'  sequence

SEQ ID NO: 42047 - DNA, 53 bp, Artificial Sequence; identical to SEQ ID NO: 2438
  Description of Artificial Sequence: Synthetic gluten; inner sequence and 3'  sequence

SEQ ID NO: 42048 - DNA, 48 bp, Artificial Sequence; identical to SEQ ID NO: 2427
  Description of Artificial Sequence: Synthetic gluten; inner sequence and 3'  sequence

SEQ ID NO: 42049 - DNA, 53 bp, Artificial Sequence; identical to SEQ ID NO: 30427
  Description of Artificial Sequence: Synthetic gluten; inner sequence and 3'  sequence

SEQ ID NO: 42050 - DNA, 53 bp, Artificial Sequence; identical to SEQ ID NO: 2015
  Description of Artificial Sequence: Synthetic gluten; inner sequence and 3'  sequence

SEQ ID NO: 42051 - DNA, 53 bp, Artificial Sequence; identical to SEQ ID NO: 2029
  Description of Artificial Sequence: Synthetic gluten; inner sequence and 3'  sequence

SEQ ID NO: 42052 - DNA, 53 bp, Artificial Sequence
  Description of Artificial Sequence: Synthetic gluten; inner sequence and 3'  sequence
gtcatgcgatggaagagaatgtgcattgtcttgactagtacatgaccacttga

SEQ ID NO: 42053 - DNA, 53 bp, Artificial Sequence; identical to SEQ ID NO: 2777
  Description of Artificial Sequence: Synthetic gluten; inner sequence and 3'  sequence

SEQ ID NO: 42054 - DNA, 53 bp, Artificial Sequence; identical to SEQ ID NO: 2142
  Description of Artificial Sequence: Synthetic gluten; inner sequence and 3'  sequence

SEQ ID NO: 42055 - DNA, 53 bp, Artificial Sequence
  Description of Artificial Sequence: Synthetic gluten; inner sequence and 3'  sequence
gtcatgcgatctcactatcaagtgttggcattgactagtacatgaccacttga

SEQ ID NO: 42056 - DNA, 53 bp, Artificial Sequence; identical to SEQ ID NO: 2147
  Description of Artificial Sequence: Synthetic gluten; inner sequence and 3'  sequence

SEQ ID NO: 42057 - DNA, 53 bp, Artificial Sequence; identical to SEQ ID NO: 2218
  Description of Artificial Sequence: Synthetic gluten; inner sequence and 3'  sequence

SEQ ID NO: 42058 - DNA, 53 bp, Artificial Sequence; identical to SEQ ID NO: 2328
  Description of Artificial Sequence: Synthetic gluten; inner sequence and 3'  sequence

SEQ ID NO: 42059 - DNA, 53 bp, Artificial Sequence; identical to SEQ ID NO: 2133
  Description of Artificial Sequence: Synthetic gluten; inner sequence and 3'  sequence

SEQ ID NO: 42060 - DNA, 53 bp, Artificial Sequence
  Description of Artificial Sequence: Synthetic gluten; inner sequence and 3'  sequence
ggactgcgatggatggggcaatacgacgttttgactagtacatgaccacttga

SEQ ID NO: 42061 - DNA, 53 bp, Artificial Sequence; identical to SEQ ID NO: 2009
  Description of Artificial Sequence: Synthetic gluten; inner sequence and 3'  sequence

SEQ ID NO: 42062 - DNA, 53 bp, Artificial Sequence; identical to SEQ ID NO: 6860
  Description of Artificial Sequence: Synthetic gluten; inner sequence and 3'  sequence

SEQ ID NO: 42063 - DNA, 52 bp, Artificial Sequence; identical to SEQ ID NO: 2070
  Description of Artificial Sequence: Synthetic gluten; inner sequence and 3'  sequence

SEQ ID NO: 42064 - DNA, 53 bp, Artificial Sequence; identical to SEQ ID NO: 2968
  Description of Artificial Sequence: Synthetic gluten; inner sequence and 3'  sequence

SEQ ID NO: 42065 - DNA, 53 bp, Artificial Sequence
  Description of Artificial Sequence: Synthetic gluten; inner sequence and 3'  sequence
gacgtcgatgaaccttcgagtgagcatgtattgactagtacatgaccacttga

SEQ ID NO: 42066 - DNA, 53 bp, Artificial Sequence; identical to SEQ ID NO: 2011
  Description of Artificial Sequence: Synthetic gluten; inner sequence and 3'  sequence

SEQ ID NO: 42067 - DNA, 53 bp, Artificial Sequence
  Description of Artificial Sequence: Synthetic gluten; inner sequence and 3'  sequence
ccgacgaagataaggcagagaggcatcctattgactagtacatgaccacttga

SEQ ID NO: 42068 - DNA, 53 bp, Artificial Sequence; identical to SEQ ID NO: 14799
  Description of Artificial Sequence: Synthetic gluten; inner sequence and 3'  sequence

SEQ ID NO: 42069 - DNA, 53 bp, Artificial Sequence; identical to SEQ ID NO: 2950
  Description of Artificial Sequence: Synthetic gluten; inner sequence and 3'  sequence

SEQ ID NO: 42070 - DNA, 53 bp, Artificial Sequence; identical to SEQ ID NO: 2013
  Description of Artificial Sequence: Synthetic gluten; inner sequence and 3'  sequence

SEQ ID NO: 42071 - DNA, 53 bp, Artificial Sequence; identical to SEQ ID NO: 2080
  Description of Artificial Sequence: Synthetic gluten; inner sequence and 3'  sequence

SEQ ID NO: 42072 - DNA, 53 bp, Artificial Sequence; identical to SEQ ID NO: 30947
  Description of Artificial Sequence: Synthetic gluten; inner sequence and 3'  sequence

SEQ ID NO: 42073 - DNA, 53 bp, Artificial Sequence
  Description of Artificial Sequence: Synthetic gluten; inner sequence and 3'  sequence
ggacaatgcgaaccgttcaagtcgaatggattgactagtacatgaccacttga

SEQ ID NO: 42074 - DNA, 53 bp, Artificial Sequence; identical to SEQ ID NO: 2715
  Description of Artificial Sequence: Synthetic gluten; inner sequence and 3'  sequence

SEQ ID NO: 42075 - DNA, 53 bp, Artificial Sequence; identical to SEQ ID NO: 2066
  Description of Artificial Sequence: Synthetic gluten; inner sequence and 3'  sequence

SEQ ID NO: 42076 - DNA, 53 bp, Artificial Sequence; identical to SEQ ID NO: 2253
  Description of Artificial Sequence: Synthetic gluten; inner sequence and 3'  sequence

SEQ ID NO: 42077 - DNA, 53 bp, Artificial Sequence; identical to SEQ ID NO: 30989
  Description of Artificial Sequence: Synthetic gluten; inner sequence and 3'  sequence

SEQ ID NO: 42078 - DNA, 53 bp, Artificial Sequence; identical to SEQ ID NO: 10988
  Description of Artificial Sequence: Synthetic gluten; inner sequence and 3'  sequence

SEQ ID NO: 42079 - DNA, 53 bp, Artificial Sequence; identical to SEQ ID NO: 2741
  Description of Artificial Sequence: Synthetic gluten; inner sequence and 3'  sequence

SEQ ID NO: 42080 - DNA, 53 bp, Artificial Sequence; identical to SEQ ID NO: 2028
  Description of Artificial Sequence: Synthetic gluten; inner sequence and 3'  sequence

SEQ ID NO: 42081 - DNA, 53 bp, Artificial Sequence
  Description of Artificial Sequence: Synthetic gluten; inner sequence and 3'  sequence
acattggacggaacgacccttcaagcgggcttgactagtacatgaccacttga

SEQ ID NO: 42082 - DNA, 53 bp, Artificial Sequence
  Description of Artificial Sequence: Synthetic gluten; inner sequence and 3'  sequence
aggcacgagctccagaaccttcagtcagcattgactagtacatgaccacttga

SEQ ID NO: 42083 - DNA, 53 bp, Artificial Sequence; identical to SEQ ID NO: 2191
  Description of Artificial Sequence: Synthetic gluten; inner sequence and 3'  sequence

SEQ ID NO: 42084 - DNA, 53 bp, Artificial Sequence; identical to SEQ ID NO: 2016
  Description of Artificial Sequence: Synthetic gluten; inner sequence and 3'  sequence

SEQ ID NO: 42085 - DNA, 53 bp, Artificial Sequence; identical to SEQ ID NO: 10991
  Description of Artificial Sequence: Synthetic gluten; inner sequence and 3'  sequence

SEQ ID NO: 42086 - DNA, 53 bp, Artificial Sequence
  Description of Artificial Sequence: Synthetic gluten; inner sequence and 3'  sequence
ggccgtcgatgagcgcgcatgtatcgtgtcttgactagtacatgaccacttga

SEQ ID NO: 42087 - DNA, 53 bp, Artificial Sequence
  Description of Artificial Sequence: Synthetic gluten; inner sequence and 3'  sequence
ggcatgctcgaccctcatgtgggacaggtattgactagtacatgaccacttga

SEQ ID NO: 42088 - DNA, 53 bp, Artificial Sequence; identical to SEQ ID NO: 6981
  Description of Artificial Sequence: Synthetic gluten; inner sequence and 3'  sequence

SEQ ID NO: 42089 - DNA, 53 bp, Artificial Sequence; identical to SEQ ID NO: 2041
  Description of Artificial Sequence: Synthetic gluten; inner sequence and 3'  sequence

SEQ ID NO: 42090 - DNA, 53 bp, Artificial Sequence
  Description of Artificial Sequence: Synthetic gluten; inner sequence and 3'  sequence
catgtgcaacgtatagccgaaatgggcatattgactagtacatgaccacttga

SEQ ID NO: 42091 - DNA, 53 bp, Artificial Sequence; identical to SEQ ID NO: 2316
  Description of Artificial Sequence: Synthetic gluten; inner sequence and 3'  sequence

SEQ ID NO: 42092 - DNA, 53 bp, Artificial Sequence; identical to SEQ ID NO: 2692
  Description of Artificial Sequence: Synthetic gluten; inner sequence and 3'  sequence

SEQ ID NO: 42093 - DNA, 53 bp, Artificial Sequence; identical to SEQ ID NO: 6644
  Description of Artificial Sequence: Synthetic gluten; inner sequence and 3'  sequence

SEQ ID NO: 42094 - DNA, 53 bp, Artificial Sequence
  Description of Artificial Sequence: Synthetic gluten; inner sequence and 3'  sequence
catatggacagcgctacactcaagtcgtcattgactagtacatgaccacttga

SEQ ID NO: 42095 - DNA, 53 bp, Artificial Sequence; identical to SEQ ID NO: 2816
  Description of Artificial Sequence: Synthetic gluten; inner sequence and 3'  sequence

SEQ ID NO: 42096 - DNA, 53 bp, Artificial Sequence
  Description of Artificial Sequence: Synthetic gluten; inner sequence and 3'  sequence
ggacaaacgcacctatcaagtgagatggcattgactagtacatgaccacttga

SEQ ID NO: 42097 - DNA, 53 bp, Artificial Sequence; identical to SEQ ID NO: 2702
  Description of Artificial Sequence: Synthetic gluten; inner sequence and 3'  sequence

SEQ ID NO: 42098 - DNA, 53 bp, Artificial Sequence; identical to SEQ ID NO: 2889
  Description of Artificial Sequence: Synthetic gluten; inner sequence and 3'  sequence

SEQ ID NO: 42099 - DNA, 53 bp, Artificial Sequence
  Description of Artificial Sequence: Synthetic gluten; inner sequence and 3'  sequence
gtactgcacgaccgatagagcatggactgtttgactagtacatgaccacttga

SEQ ID NO: 42100 - DNA, 53 bp, Artificial Sequence
  Description of Artificial Sequence: Synthetic gluten; inner sequence and 3'  sequence
gtaccaacgcacccttcaagatgtcatggattgactagtacatgaccacttga

SEQ ID NO: 42101 - DNA, 53 bp, Artificial Sequence
  Description of Artificial Sequence: Synthetic gluten; inner sequence and 3'  sequence
ggacagcgatggatgtggaaatgcgacgtcttgactagtacatgaccacttga

SEQ ID NO: 42102 - DNA, 53 bp, Artificial Sequence
  Description of Artificial Sequence: Synthetic gluten; inner sequence and 3'  sequence
ggcatgcgattccctgtcaacgcttgatcattgactagtacatgaccacttga

SEQ ID NO: 42103 - DNA, 53 bp, Artificial Sequence
  Description of Artificial Sequence: Synthetic gluten; inner sequence and 3'  sequence
ggcctgatcgaacctagagagaggcgtggattgactagtacatgaccacttga

SEQ ID NO: 42104 - DNA, 53 bp, Artificial Sequence; identical to SEQ ID NO: 6234
  Description of Artificial Sequence: Synthetic gluten; inner sequence and 3'  sequence

SEQ ID NO: 42105 - DNA, 53 bp, Artificial Sequence
  Description of Artificial Sequence: Synthetic gluten; inner sequence and 3'  sequence
ccatcatggcatgatattcactggcgtgtcttgactagtacatgaccacttga

SEQ ID NO: 42106 - DNA, 53 bp, Artificial Sequence; identical to SEQ ID NO: 2045
  Description of Artificial Sequence: Synthetic gluten; inner sequence and 3'  sequence

SEQ ID NO: 42107 - DNA, 53 bp, Artificial Sequence; identical to SEQ ID NO: 30662
  Description of Artificial Sequence: Synthetic gluten; inner sequence and 3'  sequence

SEQ ID NO: 42108 - DNA, 53 bp, Artificial Sequence; identical to SEQ ID NO: 2265
  Description of Artificial Sequence: Synthetic gluten; inner sequence and 3'  sequence

SEQ ID NO: 42109 - DNA, 53 bp, Artificial Sequence; identical to SEQ ID NO: 2203
  Description of Artificial Sequence: Synthetic gluten; inner sequence and 3'  sequence

SEQ ID NO: 42110 - DNA, 53 bp, Artificial Sequence; identical to SEQ ID NO: 2764
  Description of Artificial Sequence: Synthetic gluten; inner sequence and 3'  sequence

SEQ ID NO: 42111 - DNA, 53 bp, Artificial Sequence
  Description of Artificial Sequence: Synthetic gluten; inner sequence and 3'  sequence
cgatcacgagaagatgaactgcgatggatgttgactagtacatgaccacttga

SEQ ID NO: 42112 - DNA, 53 bp, Artificial Sequence; identical to SEQ ID NO: 2007
  Description of Artificial Sequence: Synthetic gluten; inner sequence and 3'  sequence

SEQ ID NO: 42113 - DNA, 53 bp, Artificial Sequence
  Description of Artificial Sequence: Synthetic gluten; inner sequence and 3'  sequence
gacgacgcgaacctatcaagggctcatggattgactagtacatgaccacttga

SEQ ID NO: 42114 - DNA, 53 bp, Artificial Sequence; identical to SEQ ID NO: 2099
  Description of Artificial Sequence: Synthetic gluten; inner sequence and 3'  sequence

SEQ ID NO: 42115 - DNA, 53 bp, Artificial Sequence
  Description of Artificial Sequence: Synthetic gluten; inner sequence and 3'  sequence
gtcatgcgttgacctaccagtggccaggtattgactagtacatgaccacttga

SEQ ID NO: 42116 - DNA, 53 bp, Artificial Sequence
  Description of Artificial Sequence: Synthetic gluten; inner sequence and 3'  sequence
tggccgacctattgcctaacaagtgtggcattgactagtacatgaccacttga

SEQ ID NO: 42117 - DNA, 53 bp, Artificial Sequence
  Description of Artificial Sequence: Synthetic gluten; inner sequence and 3'  sequence
tggccgacgagtcactatcaagttcgggcattgactagtacatgaccacttga

SEQ ID NO: 42118 - DNA, 53 bp, Artificial Sequence
  Description of Artificial Sequence: Synthetic gluten; inner sequence and 3'  sequence
atgcacttcgatggatggtcagccacgacgttgactagtacatgaccacttga

SEQ ID NO: 42119 - DNA, 53 bp, Artificial Sequence; identical to SEQ ID NO: 6535
  Description of Artificial Sequence: Synthetic gluten; inner sequence and 3'  sequence

SEQ ID NO: 42120 - DNA, 53 bp, Artificial Sequence
  Description of Artificial Sequence: Synthetic gluten; inner sequence and 3'  sequence
ggcctgatcgaacctagagagcggcgtggattgactagtacatgaccacttga

SEQ ID NO: 42121 - DNA, 53 bp, Artificial Sequence
  Description of Artificial Sequence: Synthetic gluten; inner sequence and 3'  sequence
acatgtcacgaacgaacctacatgtggacattgactagtacatgaccacttga

SEQ ID NO: 42122 - DNA, 53 bp, Artificial Sequence
  Description of Artificial Sequence: Synthetic gluten; inner sequence and 3'  sequence
catgtacacagtgcagcaccatgtggcatattgactagtacatgaccacttga

SEQ ID NO: 42123 - DNA, 53 bp, Artificial Sequence; identical to SEQ ID NO: 2122
  Description of Artificial Sequence: Synthetic gluten; inner sequence and 3'  sequence

SEQ ID NO: 42124 - DNA, 53 bp, Artificial Sequence; identical to SEQ ID NO: 2145
  Description of Artificial Sequence: Synthetic gluten; inner sequence and 3'  sequence

SEQ ID NO: 42125 - DNA, 53 bp, Artificial Sequence; identical to SEQ ID NO: 2911
  Description of Artificial Sequence: Synthetic gluten; inner sequence and 3'  sequence

SEQ ID NO: 42126 - DNA, 53 bp, Artificial Sequence; identical to SEQ ID NO: 2049
  Description of Artificial Sequence: Synthetic gluten; inner sequence and 3'  sequence

SEQ ID NO: 42127 - DNA, 53 bp, Artificial Sequence; identical to SEQ ID NO: 6889
  Description of Artificial Sequence: Synthetic gluten; inner sequence and 3'  sequence

SEQ ID NO: 42128 - DNA, 53 bp, Artificial Sequence; identical to SEQ ID NO: 2311
  Description of Artificial Sequence: Synthetic gluten; inner sequence and 3'  sequence

SEQ ID NO: 42129 - DNA, 53 bp, Artificial Sequence
  Description of Artificial Sequence: Synthetic gluten; inner sequence and 3'  sequence
ggacagagcgaacccttcaagtgtgctgtattgactagtacatgaccacttga

SEQ ID NO: 42130 - DNA, 53 bp, Artificial Sequence
  Description of Artificial Sequence: Synthetic gluten; inner sequence and 3'  sequence
gaccgaacggaacttcatgtgcgatatgtattgactagtacatgaccacttga

SEQ ID NO: 42131 - DNA, 53 bp, Artificial Sequence
  Description of Artificial Sequence: Synthetic gluten; inner sequence and 3'  sequence
ggacaaacgcagcctacatgtggaagtgtattgactagtacatgaccacttga

SEQ ID NO: 42132 - DNA, 53 bp, Artificial Sequence
  Description of Artificial Sequence: Synthetic gluten; inner sequence and 3'  sequence
gtcatgcgatggattgggcattgcgtaggcttgactagtacatgaccacttga

SEQ ID NO: 42133 - DNA, 53 bp, Artificial Sequence
  Description of Artificial Sequence: Synthetic gluten; inner sequence and 3'  sequence
catgtacacatggacagcgtgaacgtcatattgactagtacatgaccacttga

SEQ ID NO: 42134 - DNA, 53 bp, Artificial Sequence; identical to SEQ ID NO: 2264
  Description of Artificial Sequence: Synthetic gluten; inner sequence and 3'  sequence

SEQ ID NO: 42135 - DNA, 53 bp, Artificial Sequence; identical to SEQ ID NO: 6254
  Description of Artificial Sequence: Synthetic gluten; inner sequence and 3'  sequence

SEQ ID NO: 42136 - DNA, 53 bp, Artificial Sequence; identical to SEQ ID NO: 2031
  Description of Artificial Sequence: Synthetic gluten; inner sequence and 3'  sequence

SEQ ID NO: 42137 - DNA, 53 bp, Artificial Sequence
  Description of Artificial Sequence: Synthetic gluten; inner sequence and 3'  sequence
gacattcacgaacctacaactggacgtgtattgactagtacatgaccacttga

SEQ ID NO: 42138 - DNA, 53 bp, Artificial Sequence
  Description of Artificial Sequence: Synthetic gluten; inner sequence and 3'  sequence
catgtgcggaaaggcgtcgaagaaggcatattgactagtacatgaccacttga

SEQ ID NO: 42139 - DNA, 53 bp, Artificial Sequence
  Description of Artificial Sequence: Synthetic gluten; inner sequence and 3'  sequence
catgtgcgaactagtatcgtttagagcatattgactagtacatgaccacttga

SEQ ID NO: 42140 - DNA, 53 bp, Artificial Sequence
  Description of Artificial Sequence: Synthetic gluten; inner sequence and 3'  sequence
gacgtgaacgacctcaagggacatgcactattgactagtacatgaccacttga

SEQ ID NO: 42141 - DNA, 53 bp, Artificial Sequence
  Description of Artificial Sequence: Synthetic gluten; inner sequence and 3'  sequence
aatatggccgagacaagctacgagctagttttgactagtacatgaccacttga

SEQ ID NO: 42142 - DNA, 53 bp, Artificial Sequence
  Description of Artificial Sequence: Synthetic gluten; inner sequence and 3'  sequence
catgacgacaccgagcgtatacacgacatattgactagtacatgaccacttga

SEQ ID NO: 42143 - DNA, 53 bp, Artificial Sequence; identical to SEQ ID NO: 2703
  Description of Artificial Sequence: Synthetic gluten; inner sequence and 3'  sequence

SEQ ID NO: 42144 - DNA, 53 bp, Artificial Sequence
  Description of Artificial Sequence: Synthetic gluten; inner sequence and 3'  sequence
ggccgacgatggaagtgagcttgcctagtcttgactagtacatgaccacttga

SEQ ID NO: 42145 - DNA, 53 bp, Artificial Sequence
  Description of Artificial Sequence: Synthetic gluten; inner sequence and 3'  sequence
acgtcacgggaaacttgccggcattgtagcttgactagtacatgaccacttga

SEQ ID NO: 42146 - DNA, 53 bp, Artificial Sequence
  Description of Artificial Sequence: Synthetic gluten; inner sequence and 3'  sequence
tcatcacatgaacgcgttctgagctggtcattgactagtacatgaccacttga

SEQ ID NO: 42147 - DNA, 53 bp, Artificial Sequence
  Description of Artificial Sequence: Synthetic gluten; inner sequence and 3'  sequence
gtaccgaacgtagcctaaagtgatcgtggattgactagtacatgaccacttga

SEQ ID NO: 42148 - DNA, 53 bp, Artificial Sequence; identical to SEQ ID NO: 2230
  Description of Artificial Sequence: Synthetic gluten; inner sequence and 3'  sequence

SEQ ID NO: 42149 - DNA, 53 bp, Artificial Sequence; identical to SEQ ID NO: 2215
  Description of Artificial Sequence: Synthetic gluten; inner sequence and 3'  sequence

SEQ ID NO: 42150 - DNA, 53 bp, Artificial Sequence
  Description of Artificial Sequence: Synthetic gluten; inner sequence and 3'  sequence
tggaacgcagaaaggtggatcggtcaacaattgactagtacatgaccacttga

SEQ ID NO: 42151 - DNA, 53 bp, Artificial Sequence; identical to SEQ ID NO: 2207
  Description of Artificial Sequence: Synthetic gluten; inner sequence and 3'  sequence

SEQ ID NO: 42152 - DNA, 53 bp, Artificial Sequence
  Description of Artificial Sequence: Synthetic gluten; inner sequence and 3'  sequence
ggcatgcgatgagctcaagttggccttgtattgactagtacatgaccacttga

SEQ ID NO: 42153 - DNA, 53 bp, Artificial Sequence; identical to SEQ ID NO: 2014
  Description of Artificial Sequence: Synthetic gluten; inner sequence and 3'  sequence

SEQ ID NO: 42154 - DNA, 53 bp, Artificial Sequence; identical to SEQ ID NO: 2025
  Description of Artificial Sequence: Synthetic gluten; inner sequence and 3'  sequence

SEQ ID NO: 42155 - DNA, 53 bp, Artificial Sequence
  Description of Artificial Sequence: Synthetic gluten; inner sequence and 3'  sequence
ccgacgatgaccgtgagactcaagcggacattgactagtacatgaccacttga

SEQ ID NO: 42156 - DNA, 53 bp, Artificial Sequence; identical to SEQ ID NO: 6775
  Description of Artificial Sequence: Synthetic gluten; inner sequence and 3'  sequence

SEQ ID NO: 42157 - DNA, 53 bp, Artificial Sequence; identical to SEQ ID NO: 2714
  Description of Artificial Sequence: Synthetic gluten; inner sequence and 3'  sequence

SEQ ID NO: 42158 - DNA, 53 bp, Artificial Sequence; identical to SEQ ID NO: 2906
  Description of Artificial Sequence: Synthetic gluten; inner sequence and 3'  sequence

SEQ ID NO: 42159 - DNA, 53 bp, Artificial Sequence
  Description of Artificial Sequence: Synthetic gluten; inner sequence and 3'  sequence
aacatggccgacgacaccgatcatgtgggattgactagtacatgaccacttga

SEQ ID NO: 42160 - DNA, 53 bp, Artificial Sequence; identical to SEQ ID NO: 2093
  Description of Artificial Sequence: Synthetic gluten; inner sequence and 3'  sequence

SEQ ID NO: 42161 - DNA, 53 bp, Artificial Sequence; identical to SEQ ID NO: 2299
  Description of Artificial Sequence: Synthetic gluten; inner sequence and 3'  sequence

SEQ ID NO: 42162 - DNA, 53 bp, Artificial Sequence; identical to SEQ ID NO: 2033
  Description of Artificial Sequence: Synthetic gluten; inner sequence and 3'  sequence

SEQ ID NO: 42163 - DNA, 53 bp, Artificial Sequence
  Description of Artificial Sequence: Synthetic gluten; inner sequence and 3'  sequence
cgaacgcaccgtaagaactggacagtcacattgactagtacatgaccacttga

SEQ ID NO: 42164 - DNA, 53 bp, Artificial Sequence
  Description of Artificial Sequence: Synthetic gluten; inner sequence and 3'  sequence
catgtacgcataaaggtgcagtcactcatattgactagtacatgaccacttga

SEQ ID NO: 42165 - DNA, 53 bp, Artificial Sequence; identical to SEQ ID NO: 38702
  Description of Artificial Sequence: Synthetic gluten; inner sequence and 3'  sequence

SEQ ID NO: 42166 - DNA, 53 bp, Artificial Sequence; identical to SEQ ID NO: 38967
  Description of Artificial Sequence: Synthetic gluten; inner sequence and 3'  sequence

SEQ ID NO: 42167 - DNA, 53 bp, Artificial Sequence; identical to SEQ ID NO: 10401
  Description of Artificial Sequence: Synthetic gluten; inner sequence and 3'  sequence

SEQ ID NO: 42168 - DNA, 53 bp, Artificial Sequence; identical to SEQ ID NO: 2243
  Description of Artificial Sequence: Synthetic gluten; inner sequence and 3'  sequence

SEQ ID NO: 42169 - DNA, 53 bp, Artificial Sequence; identical to SEQ ID NO: 2134
  Description of Artificial Sequence: Synthetic gluten; inner sequence and 3'  sequence

SEQ ID NO: 42170 - DNA, 53 bp, Artificial Sequence
  Description of Artificial Sequence: Synthetic gluten; inner sequence and 3'  sequence
ccatcagatgcaaaacgacaattgggcattttgactagtacatgaccacttga

SEQ ID NO: 42171 - DNA, 53 bp, Artificial Sequence; identical to SEQ ID NO: 6451
  Description of Artificial Sequence: Synthetic gluten; inner sequence and 3'  sequence

SEQ ID NO: 42172 - DNA, 53 bp, Artificial Sequence
  Description of Artificial Sequence: Synthetic gluten; inner sequence and 3'  sequence
gtcacactctgaacgtcaatggtcgatggattgactagtacatgaccacttga

SEQ ID NO: 42173 - DNA, 53 bp, Artificial Sequence; identical to SEQ ID NO: 2811
  Description of Artificial Sequence: Synthetic gluten; inner sequence and 3'  sequence

SEQ ID NO: 42174 - DNA, 53 bp, Artificial Sequence
  Description of Artificial Sequence: Synthetic gluten; inner sequence and 3'  sequence
catgtacgcaccacgtatgcaaatatcatattgactagtacatgaccacttga

SEQ ID NO: 42175 - DNA, 53 bp, Artificial Sequence
  Description of Artificial Sequence: Synthetic gluten; inner sequence and 3'  sequence
ggcctgatcgaacctagagagtggcgcggattgactagtacatgaccacttga

SEQ ID NO: 42176 - DNA, 53 bp, Artificial Sequence
  Description of Artificial Sequence: Synthetic gluten; inner sequence and 3'  sequence
cggaacagagagccgaagatacagtgtcacttgactagtacatgaccacttga

SEQ ID NO: 42177 - DNA, 53 bp, Artificial Sequence; identical to SEQ ID NO: 30586
  Description of Artificial Sequence: Synthetic gluten; inner sequence and 3'  sequence

SEQ ID NO: 42178 - DNA, 53 bp, Artificial Sequence; identical to SEQ ID NO: 6591
  Description of Artificial Sequence: Synthetic gluten; inner sequence and 3'  sequence

SEQ ID NO: 42179 - DNA, 53 bp, Artificial Sequence
  Description of Artificial Sequence: Synthetic gluten; inner sequence and 3'  sequence
gtacgcaatcgttacctagcaagctgggcattgactagtacatgaccacttga

SEQ ID NO: 42180 - DNA, 53 bp, Artificial Sequence
  Description of Artificial Sequence: Synthetic gluten; inner sequence and 3'  sequence
caacaaaccggcactagatattggctcacgttgactagtacatgaccacttga

SEQ ID NO: 42181 - DNA, 53 bp, Artificial Sequence
  Description of Artificial Sequence: Synthetic gluten; inner sequence and 3'  sequence
ggacgaaatgcccgaaagtgcgtcaacgtattgactagtacatgaccacttga

SEQ ID NO: 42182 - DNA, 53 bp, Artificial Sequence
  Description of Artificial Sequence: Synthetic gluten; inner sequence and 3'  sequence
gaacggcgcgacctatcaggtgagcatggattgactagtacatgaccacttga

SEQ ID NO: 42183 - DNA, 53 bp, Artificial Sequence; identical to SEQ ID NO: 2208
  Description of Artificial Sequence: Synthetic gluten; inner sequence and 3'  sequence

SEQ ID NO: 42184 - DNA, 53 bp, Artificial Sequence
  Description of Artificial Sequence: Synthetic gluten; inner sequence and 3'  sequence
tggactgaacgaaccgaatcatgatgcgcattgactagtacatgaccacttga

SEQ ID NO: 42185 - DNA, 53 bp, Artificial Sequence; identical to SEQ ID NO: 2020
  Description of Artificial Sequence: Synthetic gluten; inner sequence and 3'  sequence

SEQ ID NO: 42186 - DNA, 53 bp, Artificial Sequence; identical to SEQ ID NO: 2740
  Description of Artificial Sequence: Synthetic gluten; inner sequence and 3'  sequence

SEQ ID NO: 42187 - DNA, 53 bp, Artificial Sequence; identical to SEQ ID NO: 38552
  Description of Artificial Sequence: Synthetic gluten; inner sequence and 3'  sequence

SEQ ID NO: 42188 - DNA, 53 bp, Artificial Sequence
  Description of Artificial Sequence: Synthetic gluten; inner sequence and 3'  sequence
aatacgtccgaatctggatgtgcgaatgtattgactagtacatgaccacttga

SEQ ID NO: 42189 - DNA, 53 bp, Artificial Sequence
  Description of Artificial Sequence: Synthetic gluten; inner sequence and 3'  sequence
gaccaagcgatacctagcaagtgtggaatgttgactagtacatgaccacttga

SEQ ID NO: 42190 - DNA, 53 bp, Artificial Sequence; identical to SEQ ID NO: 30849
  Description of Artificial Sequence: Synthetic gluten; inner sequence and 3'  sequence

SEQ ID NO: 42191 - DNA, 53 bp, Artificial Sequence
  Description of Artificial Sequence: Synthetic gluten; inner sequence and 3'  sequence
gaccgagcgacctatagagcatgcacttgcttgactagtacatgaccacttga

SEQ ID NO: 42192 - DNA, 53 bp, Artificial Sequence; identical to SEQ ID NO: 30452
  Description of Artificial Sequence: Synthetic gluten; inner sequence and 3'  sequence

SEQ ID NO: 42193 - DNA, 53 bp, Artificial Sequence; identical to SEQ ID NO: 2004
  Description of Artificial Sequence: Synthetic gluten; inner sequence and 3'  sequence

SEQ ID NO: 42194 - DNA, 53 bp, Artificial Sequence
  Description of Artificial Sequence: Synthetic gluten; inner sequence and 3'  sequence
gtacgatgcgaccgaagtgatcacagcagcttgactagtacatgaccacttga

SEQ ID NO: 42195 - DNA, 53 bp, Artificial Sequence
  Description of Artificial Sequence: Synthetic gluten; inner sequence and 3'  sequence
gacattcgctgaacgttcaagggacgtggattgactagtacatgaccacttga

SEQ ID NO: 42196 - DNA, 53 bp, Artificial Sequence
  Description of Artificial Sequence: Synthetic gluten; inner sequence and 3'  sequence
gacgcctcgtaccctgaaagtgcgagtgtattgactagtacatgaccacttga

SEQ ID NO: 42197 - DNA, 53 bp, Artificial Sequence
  Description of Artificial Sequence: Synthetic gluten; inner sequence and 3'  sequence
ggcatgcgctgggcagtgatcacgtacggtttgactagtacatgaccacttga

SEQ ID NO: 42198 - DNA, 53 bp, Artificial Sequence
  Description of Artificial Sequence: Synthetic gluten; inner sequence and 3'  sequence
catgctcgtaacacagacaaacagttcatattgactagtacatgaccacttga

SEQ ID NO: 42199 - DNA, 53 bp, Artificial Sequence; identical to SEQ ID NO: 2346
  Description of Artificial Sequence: Synthetic gluten; inner sequence and 3'  sequence

SEQ ID NO: 42200 - DNA, 53 bp, Artificial Sequence
  Description of Artificial Sequence: Synthetic gluten; inner sequence and 3'  sequence
tggccgatcgaccctatcaagtgcagcacgttgactagtacatgaccacttga

SEQ ID NO: 42201 - DNA, 53 bp, Artificial Sequence
  Description of Artificial Sequence: Synthetic gluten; inner sequence and 3'  sequence
ggcctgagctggcattgcgctggacatgtattgactagtacatgaccacttga

SEQ ID NO: 42202 - DNA, 53 bp, Artificial Sequence; identical to SEQ ID NO: 38873
  Description of Artificial Sequence: Synthetic gluten; inner sequence and 3'  sequence

SEQ ID NO: 42203 - DNA, 53 bp, Artificial Sequence; identical to SEQ ID NO: 18949
  Description of Artificial Sequence: Synthetic gluten; inner sequence and 3'  sequence

SEQ ID NO: 42204 - DNA, 53 bp, Artificial Sequence
  Description of Artificial Sequence: Synthetic gluten; inner sequence and 3'  sequence
tcgacgcagtcaaacgcatatgacgcactcttgactagtacatgaccacttga

SEQ ID NO: 42205 - DNA, 53 bp, Artificial Sequence; identical to SEQ ID NO: 38878
  Description of Artificial Sequence: Synthetic gluten; inner sequence and 3'  sequence

SEQ ID NO: 42206 - DNA, 53 bp, Artificial Sequence
  Description of Artificial Sequence: Synthetic gluten; inner sequence and 3'  sequence
catgtacgatcaggaaagcggttcgtcatattgactagtacatgaccacttga

SEQ ID NO: 42207 - DNA, 53 bp, Artificial Sequence
  Description of Artificial Sequence: Synthetic gluten; inner sequence and 3'  sequence
cattcgatgagctagcgagtgccgtggaccttgactagtacatgaccacttga

SEQ ID NO: 42208 - DNA, 53 bp, Artificial Sequence
  Description of Artificial Sequence: Synthetic gluten; inner sequence and 3'  sequence
gacttcgatgaccgacatgtaacagtcttattgactagtacatgaccacttga

SEQ ID NO: 42209 - DNA, 53 bp, Artificial Sequence
  Description of Artificial Sequence: Synthetic gluten; inner sequence and 3'  sequence
cgataccatagagccgaagatcagtgcacgttgactagtacatgaccacttga

SEQ ID NO: 42210 - DNA, 53 bp, Artificial Sequence
  Description of Artificial Sequence: Synthetic gluten; inner sequence and 3'  sequence
tgcatcacatgaaagcataggtcctgtgggttgactagtacatgaccacttga

SEQ ID NO: 42211 - DNA, 53 bp, Artificial Sequence
  Description of Artificial Sequence: Synthetic gluten; inner sequence and 3'  sequence
agattggcatgatctgaccgaaagtgcgtcttgactagtacatgaccacttga

SEQ ID NO: 42212 - DNA, 53 bp, Artificial Sequence
  Description of Artificial Sequence: Synthetic gluten; inner sequence and 3'  sequence
tgtcctgaacgaccctatttgacctgcgcattgactagtacatgaccacttga

SEQ ID NO: 42213 - DNA, 53 bp, Artificial Sequence
  Description of Artificial Sequence: Synthetic gluten; inner sequence and 3'  sequence
catgtgtccgaagcttcacgtatgtcagcattgactagtacatgaccacttga

SEQ ID NO: 42214 - DNA, 53 bp, Artificial Sequence; identical to SEQ ID NO: 38384
  Description of Artificial Sequence: Synthetic gluten; inner sequence and 3'  sequence

SEQ ID NO: 42215 - DNA, 53 bp, Artificial Sequence; identical to SEQ ID NO: 2018
  Description of Artificial Sequence: Synthetic gluten; inner sequence and 3'  sequence

SEQ ID NO: 42216 - DNA, 53 bp, Artificial Sequence; identical to SEQ ID NO: 2686
  Description of Artificial Sequence: Synthetic gluten; inner sequence and 3'  sequence

SEQ ID NO: 42217 - DNA, 53 bp, Artificial Sequence; identical to SEQ ID NO: 10922
  Description of Artificial Sequence: Synthetic gluten; inner sequence and 3'  sequence

SEQ ID NO: 42218 - DNA, 53 bp, Artificial Sequence
  Description of Artificial Sequence: Synthetic gluten; inner sequence and 3'  sequence
gtactgagcgaaccgcatcgtgatcatggattgactagtacatgaccacttga

SEQ ID NO: 42219 - DNA, 53 bp, Artificial Sequence
  Description of Artificial Sequence: Synthetic gluten; inner sequence and 3'  sequence
agcatgtcggacgatggatgtgagcatgtattgactagtacatgaccacttga

SEQ ID NO: 42220 - DNA, 53 bp, Artificial Sequence; identical to SEQ ID NO: 38974
  Description of Artificial Sequence: Synthetic gluten; inner sequence and 3'  sequence

SEQ ID NO: 42221 - DNA, 53 bp, Artificial Sequence
  Description of Artificial Sequence: Synthetic gluten; inner sequence and 3'  sequence
gtacgacgcggaccctatcaagacggcatgttgactagtacatgaccacttga

SEQ ID NO: 42222 - DNA, 53 bp, Artificial Sequence; identical to SEQ ID NO: 2054
  Description of Artificial Sequence: Synthetic gluten; inner sequence and 3'  sequence

SEQ ID NO: 42223 - DNA, 53 bp, Artificial Sequence; identical to SEQ ID NO: 38839
  Description of Artificial Sequence: Synthetic gluten; inner sequence and 3'  sequence

SEQ ID NO: 42224 - DNA, 53 bp, Artificial Sequence
  Description of Artificial Sequence: Synthetic gluten; inner sequence and 3'  sequence
ggactgcgatggaatgtgcgaatgtacgcattgactagtacatgaccacttga

SEQ ID NO: 42225 - DNA, 53 bp, Artificial Sequence
  Description of Artificial Sequence: Synthetic gluten; inner sequence and 3'  sequence
ccgtgaggacgcaaggttgatgtaagagtcttgactagtacatgaccacttga

SEQ ID NO: 42226 - DNA, 53 bp, Artificial Sequence
  Description of Artificial Sequence: Synthetic gluten; inner sequence and 3'  sequence
ccgaacgacctgtcacgtctaggcaacacattgactagtacatgaccacttga

SEQ ID NO: 42227 - DNA, 53 bp, Artificial Sequence
  Description of Artificial Sequence: Synthetic gluten; inner sequence and 3'  sequence
catggctaacaaagggcgactgagctcatattgactagtacatgaccacttga

SEQ ID NO: 42228 - DNA, 53 bp, Artificial Sequence
  Description of Artificial Sequence: Synthetic gluten; inner sequence and 3'  sequence
gtactgcgcgaacgatcgagtgggcctggattgactagtacatgaccacttga

SEQ ID NO: 42229 - DNA, 53 bp, Artificial Sequence
  Description of Artificial Sequence: Synthetic gluten; inner sequence and 3'  sequence
gtctgacgaggacctgagagtgcgcatgtattgactagtacatgaccacttga

SEQ ID NO: 42230 - DNA, 53 bp, Artificial Sequence
  Description of Artificial Sequence: Synthetic gluten; inner sequence and 3'  sequence
ccgtagcgtcacctatcatgtggccaggtattgactagtacatgaccacttga

SEQ ID NO: 42231 - DNA, 53 bp, Artificial Sequence
  Description of Artificial Sequence: Synthetic gluten; inner sequence and 3'  sequence
ggcctgcgagtacctacgagtgatcaggtattgactagtacatgaccacttga

SEQ ID NO: 42232 - DNA, 53 bp, Artificial Sequence; identical to SEQ ID NO: 2079
  Description of Artificial Sequence: Synthetic gluten; inner sequence and 3'  sequence

SEQ ID NO: 42233 - DNA, 53 bp, Artificial Sequence; identical to SEQ ID NO: 2389
  Description of Artificial Sequence: Synthetic gluten; inner sequence and 3'  sequence

SEQ ID NO: 42234 - DNA, 53 bp, Artificial Sequence; identical to SEQ ID NO: 30298
  Description of Artificial Sequence: Synthetic gluten; inner sequence and 3'  sequence

SEQ ID NO: 42235 - DNA, 53 bp, Artificial Sequence; identical to SEQ ID NO: 2310
  Description of Artificial Sequence: Synthetic gluten; inner sequence and 3'  sequence

SEQ ID NO: 42236 - DNA, 53 bp, Artificial Sequence
  Description of Artificial Sequence: Synthetic gluten; inner sequence and 3'  sequence
gcgtgcaccctttagcagcttgcgtcaacattgactagtacatgaccacttga

SEQ ID NO: 42237 - DNA, 53 bp, Artificial Sequence; identical to SEQ ID NO: 2061
  Description of Artificial Sequence: Synthetic gluten; inner sequence and 3'  sequence

SEQ ID NO: 42238 - DNA, 53 bp, Artificial Sequence; identical to SEQ ID NO: 2111
  Description of Artificial Sequence: Synthetic gluten; inner sequence and 3'  sequence

SEQ ID NO: 42239 - DNA, 53 bp, Artificial Sequence
  Description of Artificial Sequence: Synthetic gluten; inner sequence and 3'  sequence
tcagagccgaagaccaggcataacgaagtattgactagtacatgaccacttga

SEQ ID NO: 42240 - DNA, 53 bp, Artificial Sequence
  Description of Artificial Sequence: Synthetic gluten; inner sequence and 3'  sequence
ggactgagctggatgtggctgcactagtgtttgactagtacatgaccacttga

SEQ ID NO: 42241 - DNA, 53 bp, Artificial Sequence
  Description of Artificial Sequence: Synthetic gluten; inner sequence and 3'  sequence
acgtacgtgctgaacgaccttcaagggacattgactagtacatgaccacttga

SEQ ID NO: 42242 - DNA, 53 bp, Artificial Sequence
  Description of Artificial Sequence: Synthetic gluten; inner sequence and 3'  sequence
agtatgacatcgcgaccctacgagtggacattgactagtacatgaccacttga

SEQ ID NO: 42243 - DNA, 53 bp, Artificial Sequence
  Description of Artificial Sequence: Synthetic gluten; inner sequence and 3'  sequence
catggccgagcggagataagcttgcagctattgactagtacatgaccacttga

SEQ ID NO: 42244 - DNA, 53 bp, Artificial Sequence; identical to SEQ ID NO: 2067
  Description of Artificial Sequence: Synthetic gluten; inner sequence and 3'  sequence

SEQ ID NO: 42245 - DNA, 53 bp, Artificial Sequence
  Description of Artificial Sequence: Synthetic gluten; inner sequence and 3'  sequence
tagcacagcacatcacgagatatcgcgcacttgactagtacatgaccacttga

SEQ ID NO: 42246 - DNA, 53 bp, Artificial Sequence
  Description of Artificial Sequence: Synthetic gluten; inner sequence and 3'  sequence
cttcccgtcaggcaggcattgcacgcaggcttgactagtacatgaccacttga

SEQ ID NO: 42247 - DNA, 53 bp, Artificial Sequence
  Description of Artificial Sequence: Synthetic gluten; inner sequence and 3'  sequence
ggcctgcgatgaccggtctgtataggcaatttgactagtacatgaccacttga

SEQ ID NO: 42248 - DNA, 53 bp, Artificial Sequence
  Description of Artificial Sequence: Synthetic gluten; inner sequence and 3'  sequence
ggccggcgatggatgtgaaatggcttgtctttgactagtacatgaccacttga

SEQ ID NO: 42249 - DNA, 53 bp, Artificial Sequence
  Description of Artificial Sequence: Synthetic gluten; inner sequence and 3'  sequence
tggactgcgagtcacacaagtgcatgtctattgactagtacatgaccacttga

SEQ ID NO: 42250 - DNA, 53 bp, Artificial Sequence
  Description of Artificial Sequence: Synthetic gluten; inner sequence and 3'  sequence
cgtacatgagtggcgacatcccctttgtcattgactagtacatgaccacttga

SEQ ID NO: 42251 - DNA, 53 bp, Artificial Sequence; identical to SEQ ID NO: 10950
  Description of Artificial Sequence: Synthetic gluten; inner sequence and 3'  sequence

SEQ ID NO: 42252 - DNA, 53 bp, Artificial Sequence; identical to SEQ ID NO: 6592
  Description of Artificial Sequence: Synthetic gluten; inner sequence and 3'  sequence

SEQ ID NO: 42253 - DNA, 53 bp, Artificial Sequence
  Description of Artificial Sequence: Synthetic gluten; inner sequence and 3'  sequence
gtacgtcgaggccctacaagtgagagggtattgactagtacatgaccacttga

SEQ ID NO: 42254 - DNA, 53 bp, Artificial Sequence; identical to SEQ ID NO: 2548
  Description of Artificial Sequence: Synthetic gluten; inner sequence and 3'  sequence

SEQ ID NO: 42255 - DNA, 53 bp, Artificial Sequence
  Description of Artificial Sequence: Synthetic gluten; inner sequence and 3'  sequence
tgtccgacgcgaccatatcaagtgcatggattgactagtacatgaccacttga

SEQ ID NO: 42256 - DNA, 53 bp, Artificial Sequence
  Description of Artificial Sequence: Synthetic gluten; inner sequence and 3'  sequence
catggccgagagaagctacactaaggcacattgactagtacatgaccacttga

SEQ ID NO: 42257 - DNA, 52 bp, Artificial Sequence
  Description of Artificial Sequence: Synthetic gluten; inner sequence and 3'  sequence
gacgcactctaccctacatgcactacgtcttgactagtacatgaccacttga

SEQ ID NO: 42258 - DNA, 53 bp, Artificial Sequence; identical to SEQ ID NO: 10682
  Description of Artificial Sequence: Synthetic gluten; inner sequence and 3'  sequence

SEQ ID NO: 42259 - DNA, 53 bp, Artificial Sequence
  Description of Artificial Sequence: Synthetic gluten; inner sequence and 3'  sequence
cgcaccctatcacgtggaagtgaacttggcttgactagtacatgaccacttga

SEQ ID NO: 42260 - DNA, 48 bp, Artificial Sequence
  Description of Artificial Sequence: Synthetic gluten; inner sequence and 3'  sequence
ggcctgcgatggatgtgtgcatgtattgactagtacatgaccacttga

SEQ ID NO: 42261 - DNA, 53 bp, Artificial Sequence
  Description of Artificial Sequence: Synthetic gluten; inner sequence and 3'  sequence
catgtcgagaccagtgcactttgcagcatattgactagtacatgaccacttga

SEQ ID NO: 42262 - DNA, 53 bp, Artificial Sequence
  Description of Artificial Sequence: Synthetic gluten; inner sequence and 3'  sequence
caaccgactgcaagtaccatatggctcacgttgactagtacatgaccacttga

SEQ ID NO: 42263 - DNA, 53 bp, Artificial Sequence
  Description of Artificial Sequence: Synthetic gluten; inner sequence and 3'  sequence
ggcctgatcgaacctagcgagtggcgtggattgactagtacatgaccacttga

SEQ ID NO: 42264 - DNA, 53 bp, Artificial Sequence
  Description of Artificial Sequence: Synthetic gluten; inner sequence and 3'  sequence
caacaaatcgcggactcgtaatgtctcacgttgactagtacatgaccacttga

SEQ ID NO: 42265 - DNA, 53 bp, Artificial Sequence; identical to SEQ ID NO: 2048
  Description of Artificial Sequence: Synthetic gluten; inner sequence and 3'  sequence

SEQ ID NO: 42266 - DNA, 53 bp, Artificial Sequence
  Description of Artificial Sequence: Synthetic gluten; inner sequence and 3'  sequence
cctccgaggcagctatctcatggacgcgaattgactagtacatgaccacttga

SEQ ID NO: 42267 - DNA, 53 bp, Artificial Sequence
  Description of Artificial Sequence: Synthetic gluten; inner sequence and 3'  sequence
gacgacgatgacctagtaatggacgtgttcttgactagtacatgaccacttga

SEQ ID NO: 42268 - DNA, 53 bp, Artificial Sequence
  Description of Artificial Sequence: Synthetic gluten; inner sequence and 3'  sequence
cgggaggctgaaaggaacagttcacgcaacttgactagtacatgaccacttga

SEQ ID NO: 42269 - DNA, 53 bp, Artificial Sequence
  Description of Artificial Sequence: Synthetic gluten; inner sequence and 3'  sequence
ggccgcggcttccctgaaatggacgcagcgttgactagtacatgaccacttga

SEQ ID NO: 42270 - DNA, 53 bp, Artificial Sequence; identical to SEQ ID NO: 2076
  Description of Artificial Sequence: Synthetic gluten; inner sequence and 3'  sequence

SEQ ID NO: 42271 - DNA, 53 bp, Artificial Sequence; identical to SEQ ID NO: 2154
  Description of Artificial Sequence: Synthetic gluten; inner sequence and 3'  sequence

SEQ ID NO: 42272 - DNA, 53 bp, Artificial Sequence
  Description of Artificial Sequence: Synthetic gluten; inner sequence and 3'  sequence
ggactgcgatgagctcaaggggagcatggattgactagtacatgaccacttga

SEQ ID NO: 42273 - DNA, 53 bp, Artificial Sequence
  Description of Artificial Sequence: Synthetic gluten; inner sequence and 3'  sequence
aatgtggacggctcgaaccctagctaggcattgactagtacatgaccacttga

SEQ ID NO: 42274 - DNA, 53 bp, Artificial Sequence
  Description of Artificial Sequence: Synthetic gluten; inner sequence and 3'  sequence
gacagcgcagatgaagaatacgacgactctttgactagtacatgaccacttga

SEQ ID NO: 42275 - DNA, 53 bp, Artificial Sequence
  Description of Artificial Sequence: Synthetic gluten; inner sequence and 3'  sequence
catgacgcagtaagcacgtatcgtggcatattgactagtacatgaccacttga

SEQ ID NO: 42276 - DNA, 53 bp, Artificial Sequence
  Description of Artificial Sequence: Synthetic gluten; inner sequence and 3'  sequence
gtcatgcacagaccggtaagtgctcaggtattgactagtacatgaccacttga

SEQ ID NO: 42277 - DNA, 53 bp, Artificial Sequence; identical to SEQ ID NO: 6552
  Description of Artificial Sequence: Synthetic gluten; inner sequence and 3'  sequence

SEQ ID NO: 42278 - DNA, 53 bp, Artificial Sequence; identical to SEQ ID NO: 2362
  Description of Artificial Sequence: Synthetic gluten; inner sequence and 3'  sequence

SEQ ID NO: 42279 - DNA, 53 bp, Artificial Sequence; identical to SEQ ID NO: 2850
  Description of Artificial Sequence: Synthetic gluten; inner sequence and 3'  sequence

SEQ ID NO: 42280 - DNA, 53 bp, Artificial Sequence
  Description of Artificial Sequence: Synthetic gluten; inner sequence and 3'  sequence
cgaacacgcacgtgctttgaggactagaggttgactagtacatgaccacttga

SEQ ID NO: 42281 - DNA, 53 bp, Artificial Sequence
  Description of Artificial Sequence: Synthetic gluten; inner sequence and 3'  sequence
ggcatgcgctgggaagtgatcacgtacggtttgactagtacatgaccacttga

SEQ ID NO: 42282 - DNA, 53 bp, Artificial Sequence
  Description of Artificial Sequence: Synthetic gluten; inner sequence and 3'  sequence
gcactgagcgaacccttgtcatgggacgtattgactagtacatgaccacttga

SEQ ID NO: 42283 - DNA, 53 bp, Artificial Sequence
  Description of Artificial Sequence: Synthetic gluten; inner sequence and 3'  sequence
caatcacatggtgcggactgatggttcaagttgactagtacatgaccacttga

SEQ ID NO: 42284 - DNA, 53 bp, Artificial Sequence
  Description of Artificial Sequence: Synthetic gluten; inner sequence and 3'  sequence
ggcccgacgacccttcaagtgaccatcgtattgactagtacatgaccacttga

SEQ ID NO: 42285 - DNA, 53 bp, Artificial Sequence
  Description of Artificial Sequence: Synthetic gluten; inner sequence and 3'  sequence
gtcatgcactgatccgacaatgggcgtgaattgactagtacatgaccacttga

SEQ ID NO: 42286 - DNA, 53 bp, Artificial Sequence; identical to SEQ ID NO: 2355
  Description of Artificial Sequence: Synthetic gluten; inner sequence and 3'  sequence

SEQ ID NO: 42287 - DNA, 53 bp, Artificial Sequence
  Description of Artificial Sequence: Synthetic gluten; inner sequence and 3'  sequence
catgttcggaccagagcggtctccggcatattgactagtacatgaccacttga

SEQ ID NO: 42288 - DNA, 53 bp, Artificial Sequence
  Description of Artificial Sequence: Synthetic gluten; inner sequence and 3'  sequence
ggcattcgacctgcctatcaagggtgctcattgactagtacatgaccacttga

SEQ ID NO: 42289 - DNA, 53 bp, Artificial Sequence
  Description of Artificial Sequence: Synthetic gluten; inner sequence and 3'  sequence
tgctagtgcaagcagagggcattcgaagggttgactagtacatgaccacttga

SEQ ID NO: 42290 - DNA, 53 bp, Artificial Sequence
  Description of Artificial Sequence: Synthetic gluten; inner sequence and 3'  sequence
ggactgatcaaccctaagcatgtggcgatgttgactagtacatgaccacttga

SEQ ID NO: 42291 - DNA, 53 bp, Artificial Sequence
  Description of Artificial Sequence: Synthetic gluten; inner sequence and 3'  sequence
gcgagcggacctaaagaacatgtcgttggcttgactagtacatgaccacttga

SEQ ID NO: 42292 - DNA, 53 bp, Artificial Sequence
  Description of Artificial Sequence: Synthetic gluten; inner sequence and 3'  sequence
agtcacaggaagcaccggaccgattcgtcattgactagtacatgaccacttga

SEQ ID NO: 42293 - DNA, 53 bp, Artificial Sequence
  Description of Artificial Sequence: Synthetic gluten; inner sequence and 3'  sequence
ccgaaccgacatgctaatgaagtgtacgtattgactagtacatgaccacttga

SEQ ID NO: 42294 - DNA, 53 bp, Artificial Sequence
  Description of Artificial Sequence: Synthetic gluten; inner sequence and 3'  sequence
gcaacgcagcatggacgaatctggatgtggttgactagtacatgaccacttga

SEQ ID NO: 42295 - DNA, 53 bp, Artificial Sequence
  Description of Artificial Sequence: Synthetic gluten; inner sequence and 3'  sequence
ggcatgatcgaacctagagagtggcgtggattgactagtacatgaccacttga

SEQ ID NO: 42296 - DNA, 53 bp, Artificial Sequence
  Description of Artificial Sequence: Synthetic gluten; inner sequence and 3'  sequence
gtcatgcgcggacattcaagctggcgtggattgactagtacatgaccacttga

SEQ ID NO: 42297 - DNA, 53 bp, Artificial Sequence
  Description of Artificial Sequence: Synthetic gluten; inner sequence and 3'  sequence
ggactgatcgaacctagagagtggcgtggattgactagtacatgaccacttga

SEQ ID NO: 42298 - DNA, 53 bp, Artificial Sequence
  Description of Artificial Sequence: Synthetic gluten; inner sequence and 3'  sequence
catgtgcgatcagagcggtgcaccggcatattgactagtacatgaccacttga

SEQ ID NO: 42299 - DNA, 53 bp, Artificial Sequence
  Description of Artificial Sequence: Synthetic gluten; inner sequence and 3'  sequence
accgtcaggcagaagaggactgagcgcacattgactagtacatgaccacttga

SEQ ID NO: 42300 - DNA, 53 bp, Artificial Sequence; identical to SEQ ID NO: 2329
  Description of Artificial Sequence: Synthetic gluten; inner sequence and 3'  sequence

SEQ ID NO: 42301 - DNA, 53 bp, Artificial Sequence
  Description of Artificial Sequence: Synthetic gluten; inner sequence and 3'  sequence
tcgcatatggctacgatgaccgatgtgggcttgactagtacatgaccacttga

SEQ ID NO: 42302 - DNA, 53 bp, Artificial Sequence
  Description of Artificial Sequence: Synthetic gluten; inner sequence and 3'  sequence
cgcaacgcctcttggtgcatcgccatgtctttgactagtacatgaccacttga

SEQ ID NO: 42303 - DNA, 53 bp, Artificial Sequence; identical to SEQ ID NO: 2030
  Description of Artificial Sequence: Synthetic gluten; inner sequence and 3'  sequence

SEQ ID NO: 42304 - DNA, 48 bp, Artificial Sequence
  Description of Artificial Sequence: Synthetic gluten; inner sequence and 3'  sequence
ggcatgcgatggatgtgtgcgtgtattgactagtacatgaccacttga

SEQ ID NO: 42305 - DNA, 53 bp, Artificial Sequence
  Description of Artificial Sequence: Synthetic gluten; inner sequence and 3'  sequence
actcccctagcatgagtgggctatgaagcattgactagtacatgaccacttga

SEQ ID NO: 42306 - DNA, 53 bp, Artificial Sequence
  Description of Artificial Sequence: Synthetic gluten; inner sequence and 3'  sequence
ccgatcgaagctaaagagcatgaacgtggcttgactagtacatgaccacttga

SEQ ID NO: 42307 - DNA, 53 bp, Artificial Sequence; identical to SEQ ID NO: 2800
  Description of Artificial Sequence: Synthetic gluten; inner sequence and 3'  sequence

SEQ ID NO: 42308 - DNA, 53 bp, Artificial Sequence
  Description of Artificial Sequence: Synthetic gluten; inner sequence and 3'  sequence
catgtacgaccgcaaaggctcagctcaatattgactagtacatgaccacttga

SEQ ID NO: 42309 - DNA, 53 bp, Artificial Sequence
  Description of Artificial Sequence: Synthetic gluten; inner sequence and 3'  sequence
ggacttcgcgaacttcatggctggcatccattgactagtacatgaccacttga

SEQ ID NO: 42310 - DNA, 53 bp, Artificial Sequence; identical to SEQ ID NO: 38617
  Description of Artificial Sequence: Synthetic gluten; inner sequence and 3'  sequence

SEQ ID NO: 42311 - DNA, 53 bp, Artificial Sequence
  Description of Artificial Sequence: Synthetic gluten; inner sequence and 3'  sequence
ggacgaagcttccctgctactacgtcacgattgactagtacatgaccacttga

SEQ ID NO: 42312 - DNA, 53 bp, Artificial Sequence
  Description of Artificial Sequence: Synthetic gluten; inner sequence and 3'  sequence
ggccgacgatggatgtagttatggaccagcttgactagtacatgaccacttga

SEQ ID NO: 42313 - DNA, 53 bp, Artificial Sequence
  Description of Artificial Sequence: Synthetic gluten; inner sequence and 3'  sequence
ccgcactctggatgggtcacgcacgagtcattgactagtacatgaccacttga

SEQ ID NO: 42314 - DNA, 53 bp, Artificial Sequence
  Description of Artificial Sequence: Synthetic gluten; inner sequence and 3'  sequence
aatacgcccgaccttacctacacgtgatcattgactagtacatgaccacttga

SEQ ID NO: 42315 - DNA, 53 bp, Artificial Sequence
  Description of Artificial Sequence: Synthetic gluten; inner sequence and 3'  sequence
ccatatggcaggcgattaccgatgtgcgtattgactagtacatgaccacttga

SEQ ID NO: 42316 - DNA, 53 bp, Artificial Sequence; identical to SEQ ID NO: 38722
  Description of Artificial Sequence: Synthetic gluten; inner sequence and 3'  sequence

SEQ ID NO: 42317 - DNA, 53 bp, Artificial Sequence
  Description of Artificial Sequence: Synthetic gluten; inner sequence and 3'  sequence
acgtcacgggtaacaagcttgccaattgtgttgactagtacatgaccacttga

SEQ ID NO: 42318 - DNA, 53 bp, Artificial Sequence
  Description of Artificial Sequence: Synthetic gluten; inner sequence and 3'  sequence
cccagaatcacaacaaacgtgcacgctagcttgactagtacatgaccacttga

SEQ ID NO: 42319 - DNA, 53 bp, Artificial Sequence
  Description of Artificial Sequence: Synthetic gluten; inner sequence and 3'  sequence
catgtacgacagaggtgcagagcagacatattgactagtacatgaccacttga

SEQ ID NO: 42320 - DNA, 53 bp, Artificial Sequence
  Description of Artificial Sequence: Synthetic gluten; inner sequence and 3'  sequence
ggactgaacgagatctggcttgcaataggcttgactagtacatgaccacttga

SEQ ID NO: 42321 - DNA, 53 bp, Artificial Sequence
  Description of Artificial Sequence: Synthetic gluten; inner sequence and 3'  sequence
agtatggcctgcgatggatcgacgttcacattgactagtacatgaccacttga

SEQ ID NO: 42322 - DNA, 53 bp, Artificial Sequence; identical to SEQ ID NO: 2081
  Description of Artificial Sequence: Synthetic gluten; inner sequence and 3'  sequence

SEQ ID NO: 42323 - DNA, 53 bp, Artificial Sequence
  Description of Artificial Sequence: Synthetic gluten; inner sequence and 3'  sequence
gacgccacgcagcctaatcgtgatcatgtattgactagtacatgaccacttga

SEQ ID NO: 42324 - DNA, 53 bp, Artificial Sequence; identical to SEQ ID NO: 2392
  Description of Artificial Sequence: Synthetic gluten; inner sequence and 3'  sequence

SEQ ID NO: 42325 - DNA, 53 bp, Artificial Sequence
  Description of Artificial Sequence: Synthetic gluten; inner sequence and 3'  sequence
tcagatggcatgaacggcatgacgacgtgattgactagtacatgaccacttga

SEQ ID NO: 42326 - DNA, 53 bp, Artificial Sequence
  Description of Artificial Sequence: Synthetic gluten; inner sequence and 3'  sequence
gcatgacggacttgaacgatctcctttggcttgactagtacatgaccacttga

SEQ ID NO: 42327 - DNA, 53 bp, Artificial Sequence; identical to SEQ ID NO: 30644
  Description of Artificial Sequence: Synthetic gluten; inner sequence and 3'  sequence

SEQ ID NO: 42328 - DNA, 53 bp, Artificial Sequence
  Description of Artificial Sequence: Synthetic gluten; inner sequence and 3'  sequence
acatacgtacgaacgacctcaatgtgcgtcttgactagtacatgaccacttga

SEQ ID NO: 42329 - DNA, 53 bp, Artificial Sequence
  Description of Artificial Sequence: Synthetic gluten; inner sequence and 3'  sequence
tctgcatggcctgaacgatccgtgccgtcattgactagtacatgaccacttga

SEQ ID NO: 42330 - DNA, 52 bp, Artificial Sequence; identical to SEQ ID NO: 2334
  Description of Artificial Sequence: Synthetic gluten; inner sequence and 3'  sequence

SEQ ID NO: 42331 - DNA, 53 bp, Artificial Sequence
  Description of Artificial Sequence: Synthetic gluten; inner sequence and 3'  sequence
gtacgccgctccatcccttcaaggcagtcattgactagtacatgaccacttga

SEQ ID NO: 42332 - DNA, 53 bp, Artificial Sequence
  Description of Artificial Sequence: Synthetic gluten; inner sequence and 3'  sequence
cgccacgaaaccgtaaggttcagcaagtcattgactagtacatgaccacttga

SEQ ID NO: 42333 - DNA, 53 bp, Artificial Sequence; identical to SEQ ID NO: 14933
  Description of Artificial Sequence: Synthetic gluten; inner sequence and 3'  sequence

SEQ ID NO: 42334 - DNA, 53 bp, Artificial Sequence
  Description of Artificial Sequence: Synthetic gluten; inner sequence and 3'  sequence
ctgagtgaggacccaaggttgagtactgccttgactagtacatgaccacttga

SEQ ID NO: 42335 - DNA, 53 bp, Artificial Sequence
  Description of Artificial Sequence: Synthetic gluten; inner sequence and 3'  sequence
cgtaccgacgtaaggagaaaggtatgggttttgactagtacatgaccacttga

SEQ ID NO: 42336 - DNA, 53 bp, Artificial Sequence
  Description of Artificial Sequence: Synthetic gluten; inner sequence and 3'  sequence
catcgtacggacgaaagcgttaacggcatattgactagtacatgaccacttga

SEQ ID NO: 42337 - DNA, 53 bp, Artificial Sequence
  Description of Artificial Sequence: Synthetic gluten; inner sequence and 3'  sequence
ggccacgatgaacctacaggtgatcatgtattgactagtacatgaccacttga

SEQ ID NO: 42338 - DNA, 53 bp, Artificial Sequence
  Description of Artificial Sequence: Synthetic gluten; inner sequence and 3'  sequence
ggcctgatcgcacctagagagtggcgtggattgactagtacatgaccacttga

SEQ ID NO: 42339 - DNA, 53 bp, Artificial Sequence
  Description of Artificial Sequence: Synthetic gluten; inner sequence and 3'  sequence
gaccgccactccctagcaagcgcgaatgtattgactagtacatgaccacttga

SEQ ID NO: 42340 - DNA, 53 bp, Artificial Sequence
  Description of Artificial Sequence: Synthetic gluten; inner sequence and 3'  sequence
catgactaaccatctgacggacagttcatattgactagtacatgaccacttga

SEQ ID NO: 42341 - DNA, 53 bp, Artificial Sequence
  Description of Artificial Sequence: Synthetic gluten; inner sequence and 3'  sequence
gagttcgcgatccttcaagtgcagcatggattgactagtacatgaccacttga

SEQ ID NO: 42342 - DNA, 53 bp, Artificial Sequence
  Description of Artificial Sequence: Synthetic gluten; inner sequence and 3'  sequence
tcaatatcggcactcgcatgaaagttccgtttgactagtacatgaccacttga

SEQ ID NO: 42343 - DNA, 53 bp, Artificial Sequence
  Description of Artificial Sequence: Synthetic gluten; inner sequence and 3'  sequence
ggccgaaagctaagctagttaatggacacattgactagtacatgaccacttga

SEQ ID NO: 42344 - DNA, 53 bp, Artificial Sequence; identical to SEQ ID NO: 2021
  Description of Artificial Sequence: Synthetic gluten; inner sequence and 3'  sequence

SEQ ID NO: 42345 - DNA, 53 bp, Artificial Sequence
  Description of Artificial Sequence: Synthetic gluten; inner sequence and 3'  sequence
ggccgaacgacatgatgcgtatggaaagtattgactagtacatgaccacttga

SEQ ID NO: 42346 - DNA, 53 bp, Artificial Sequence
  Description of Artificial Sequence: Synthetic gluten; inner sequence and 3'  sequence
gtcatgcgcggacattcaagttggcgcggattgactagtacatgaccacttga

SEQ ID NO: 42347 - DNA, 53 bp, Artificial Sequence
  Description of Artificial Sequence: Synthetic gluten; inner sequence and 3'  sequence
cctgagcgcacccaacaatggcatggcgaattgactagtacatgaccacttga

SEQ ID NO: 42348 - DNA, 53 bp, Artificial Sequence
  Description of Artificial Sequence: Synthetic gluten; inner sequence and 3'  sequence
ggacggagcgaccgaaatggctagtcacgtttgactagtacatgaccacttga

SEQ ID NO: 42349 - DNA, 53 bp, Artificial Sequence
  Description of Artificial Sequence: Synthetic gluten; inner sequence and 3'  sequence
tggaacgccgaataaaaggtgagatcgtgcttgactagtacatgaccacttga

SEQ ID NO: 42350 - DNA, 53 bp, Artificial Sequence; identical to SEQ ID NO: 2567
  Description of Artificial Sequence: Synthetic gluten; inner sequence and 3'  sequence

SEQ ID NO: 42351 - DNA, 53 bp, Artificial Sequence
  Description of Artificial Sequence: Synthetic gluten; inner sequence and 3'  sequence
ggcctgatcgaacctcgagagtggcgtggattgactagtacatgaccacttga

SEQ ID NO: 42352 - DNA, 52 bp, Artificial Sequence
  Description of Artificial Sequence: Synthetic gluten; inner sequence and 3'  sequence
catacagccgcagtttcggaccttcagccttgactagtacatgaccacttga

SEQ ID NO: 42353 - DNA, 53 bp, Artificial Sequence
  Description of Artificial Sequence: Synthetic gluten; inner sequence and 3'  sequence
ccgactcgaccaaagtaggagtgtacgtgtttgactagtacatgaccacttga

SEQ ID NO: 42354 - DNA, 53 bp, Artificial Sequence
  Description of Artificial Sequence: Synthetic gluten; inner sequence and 3'  sequence
cgacacgacgtatcgttagcttcgcggtcattgactagtacatgaccacttga

SEQ ID NO: 42355 - DNA, 53 bp, Artificial Sequence; identical to SEQ ID NO: 30295
  Description of Artificial Sequence: Synthetic gluten; inner sequence and 3'  sequence

SEQ ID NO: 42356 - DNA, 48 bp, Artificial Sequence
  Description of Artificial Sequence: Synthetic gluten; inner sequence and 3'  sequence
ggccgacgatggatgtgagcatgtattgactagtacatgaccacttga

SEQ ID NO: 42357 - DNA, 53 bp, Artificial Sequence; identical to SEQ ID NO: 2813
  Description of Artificial Sequence: Synthetic gluten; inner sequence and 3'  sequence

SEQ ID NO: 42358 - DNA, 53 bp, Artificial Sequence; identical to SEQ ID NO: 2783
  Description of Artificial Sequence: Synthetic gluten; inner sequence and 3'  sequence

SEQ ID NO: 42359 - DNA, 53 bp, Artificial Sequence
  Description of Artificial Sequence: Synthetic gluten; inner sequence and 3'  sequence
cgcgcctatcaacgtgccaggtacgacgaattgactagtacatgaccacttga

SEQ ID NO: 42360 - DNA, 53 bp, Artificial Sequence
  Description of Artificial Sequence: Synthetic gluten; inner sequence and 3'  sequence
ggcctgaactggatgtgcggaaggtacgagttgactagtacatgaccacttga

SEQ ID NO: 42361 - DNA, 53 bp, Artificial Sequence
  Description of Artificial Sequence: Synthetic gluten; inner sequence and 3'  sequence
cattcacatggccgtcgatggatctgggcattgactagtacatgaccacttga

SEQ ID NO: 42362 - DNA, 53 bp, Artificial Sequence
  Description of Artificial Sequence: Synthetic gluten; inner sequence and 3'  sequence
tggccgaacttccctaaagaccagcactagttgactagtacatgaccacttga

SEQ ID NO: 42363 - DNA, 53 bp, Artificial Sequence
  Description of Artificial Sequence: Synthetic gluten; inner sequence and 3'  sequence
ggacgacgcgagctagcaaggaggcgtgtattgactagtacatgaccacttga

SEQ ID NO: 42364 - DNA, 53 bp, Artificial Sequence
  Description of Artificial Sequence: Synthetic gluten; inner sequence and 3'  sequence
ggccgacgaagaccttaaagtgatcgtgtattgactagtacatgaccacttga

SEQ ID NO: 42365 - DNA, 53 bp, Artificial Sequence
  Description of Artificial Sequence: Synthetic gluten; inner sequence and 3'  sequence
gtcatgcgcggacattcaaggtggcgtggattgactagtacatgaccacttga

SEQ ID NO: 42366 - DNA, 53 bp, Artificial Sequence
  Description of Artificial Sequence: Synthetic gluten; inner sequence and 3'  sequence
catgacggaacgtagctcggcagagtcatattgactagtacatgaccacttga

SEQ ID NO: 42367 - DNA, 53 bp, Artificial Sequence
  Description of Artificial Sequence: Synthetic gluten; inner sequence and 3'  sequence
gcccgagcgaacctagcatgtgggatcgtattgactagtacatgaccacttga

SEQ ID NO: 42368 - DNA, 54 bp, Artificial Sequence; identical to SEQ ID NO: 2503
  Description of Artificial Sequence: Synthetic gluten; inner sequence and 3'  sequence

SEQ ID NO: 42369 - DNA, 53 bp, Artificial Sequence
  Description of Artificial Sequence: Synthetic gluten; inner sequence and 3'  sequence
ggcatgcgatggatgtggaaatgcgacgtcttgactagtacatgaccacttga

SEQ ID NO: 42370 - DNA, 53 bp, Artificial Sequence; identical to SEQ ID NO: 2288
  Description of Artificial Sequence: Synthetic gluten; inner sequence and 3'  sequence

SEQ ID NO: 42371 - DNA, 53 bp, Artificial Sequence
  Description of Artificial Sequence: Synthetic gluten; inner sequence and 3'  sequence
caaactgacagggcaaagctatgtctcaccttgactagtacatgaccacttga

SEQ ID NO: 42372 - DNA, 53 bp, Artificial Sequence
  Description of Artificial Sequence: Synthetic gluten; inner sequence and 3'  sequence
gtacgtctcggatgaggtcttgaacgcggtttgactagtacatgaccacttga

SEQ ID NO: 42373 - DNA, 53 bp, Artificial Sequence
  Description of Artificial Sequence: Synthetic gluten; inner sequence and 3'  sequence
ccgttgatgaccaagagcatgaacgaggcattgactagtacatgaccacttga

SEQ ID NO: 42374 - DNA, 53 bp, Artificial Sequence
  Description of Artificial Sequence: Synthetic gluten; inner sequence and 3'  sequence
ttgagccgaagacacccctacgatcttgggttgactagtacatgaccacttga

SEQ ID NO: 42375 - DNA, 53 bp, Artificial Sequence
  Description of Artificial Sequence: Synthetic gluten; inner sequence and 3'  sequence
tggtcgcactcttcacgtcacaagcggacattgactagtacatgaccacttga

SEQ ID NO: 42376 - DNA, 53 bp, Artificial Sequence
  Description of Artificial Sequence: Synthetic gluten; inner sequence and 3'  sequence
ggcctgaaaagcgagaaggagcctacaaggttgactagtacatgaccacttga

SEQ ID NO: 42377 - DNA, 53 bp, Artificial Sequence
  Description of Artificial Sequence: Synthetic gluten; inner sequence and 3'  sequence
gccacagcgacctcaagtaggctggacgtattgactagtacatgaccacttga

SEQ ID NO: 42378 - DNA, 53 bp, Artificial Sequence; identical to SEQ ID NO: 2529
  Description of Artificial Sequence: Synthetic gluten; inner sequence and 3'  sequence

SEQ ID NO: 42379 - DNA, 53 bp, Artificial Sequence; identical to SEQ ID NO: 2504
  Description of Artificial Sequence: Synthetic gluten; inner sequence and 3'  sequence

SEQ ID NO: 42380 - DNA, 53 bp, Artificial Sequence; identical to SEQ ID NO: 6406
  Description of Artificial Sequence: Synthetic gluten; inner sequence and 3'  sequence

SEQ ID NO: 42381 - DNA, 53 bp, Artificial Sequence
  Description of Artificial Sequence: Synthetic gluten; inner sequence and 3'  sequence
gacgctaggaggcctaaatgcgtgaacatattgactagtacatgaccacttga

SEQ ID NO: 42382 - DNA, 53 bp, Artificial Sequence
  Description of Artificial Sequence: Synthetic gluten; inner sequence and 3'  sequence
ggcattcgatgcactacaagctgttgtgtattgactagtacatgaccacttga

SEQ ID NO: 42383 - DNA, 53 bp, Artificial Sequence
  Description of Artificial Sequence: Synthetic gluten; inner sequence and 3'  sequence
catgcatggggagcagtggcttagctgacattgactagtacatgaccacttga

SEQ ID NO: 42384 - DNA, 53 bp, Artificial Sequence
  Description of Artificial Sequence: Synthetic gluten; inner sequence and 3'  sequence
catgtaccaagagttacgttcaccggcatattgactagtacatgaccacttga

SEQ ID NO: 42385 - DNA, 52 bp, Artificial Sequence
  Description of Artificial Sequence: Synthetic gluten; inner sequence and 3'  sequence
gccctgcgatgaccgaaagtgggttggacttgactagtacatgaccacttga

SEQ ID NO: 42386 - DNA, 53 bp, Artificial Sequence; identical to SEQ ID NO: 2673
  Description of Artificial Sequence: Synthetic gluten; inner sequence and 3'  sequence

SEQ ID NO: 42387 - DNA, 53 bp, Artificial Sequence
  Description of Artificial Sequence: Synthetic gluten; inner sequence and 3'  sequence
ctggccggagagtagctacaaatgtcttcattgactagtacatgaccacttga

SEQ ID NO: 42388 - DNA, 53 bp, Artificial Sequence
  Description of Artificial Sequence: Synthetic gluten; inner sequence and 3'  sequence
tcgggccacctacgcatcatcaacacgtggttgactagtacatgaccacttga

SEQ ID NO: 42389 - DNA, 53 bp, Artificial Sequence
  Description of Artificial Sequence: Synthetic gluten; inner sequence and 3'  sequence
ggactgcgatggatgaggtgctgcactagtttgactagtacatgaccacttga

SEQ ID NO: 42390 - DNA, 53 bp, Artificial Sequence
  Description of Artificial Sequence: Synthetic gluten; inner sequence and 3'  sequence
aatgtggaatgaacgaccaagagcatggatttgactagtacatgaccacttga

SEQ ID NO: 42391 - DNA, 53 bp, Artificial Sequence
  Description of Artificial Sequence: Synthetic gluten; inner sequence and 3'  sequence
ggcctgaacaaccgatagaacatggcgtaattgactagtacatgaccacttga

SEQ ID NO: 42392 - DNA, 53 bp, Artificial Sequence
  Description of Artificial Sequence: Synthetic gluten; inner sequence and 3'  sequence
gtcatgcgcggacattcaagatggcgtggattgactagtacatgaccacttga

SEQ ID NO: 42393 - DNA, 53 bp, Artificial Sequence
  Description of Artificial Sequence: Synthetic gluten; inner sequence and 3'  sequence
cttgcatatgaacgcgctctggatgtgggcttgactagtacatgaccacttga

SEQ ID NO: 42394 - DNA, 53 bp, Artificial Sequence
  Description of Artificial Sequence: Synthetic gluten; inner sequence and 3'  sequence
cattacgtacaaagggcgtgcagactcatattgactagtacatgaccacttga

SEQ ID NO: 42395 - DNA, 53 bp, Artificial Sequence
  Description of Artificial Sequence: Synthetic gluten; inner sequence and 3'  sequence
cttccacccaaagtccttcgagccggtgtcttgactagtacatgaccacttga

SEQ ID NO: 42396 - DNA, 53 bp, Artificial Sequence
  Description of Artificial Sequence: Synthetic gluten; inner sequence and 3'  sequence
ggcctcgaagcccttcaagcggttcatggattgactagtacatgaccacttga

SEQ ID NO: 42397 - DNA, 53 bp, Artificial Sequence
  Description of Artificial Sequence: Synthetic gluten; inner sequence and 3'  sequence
gtgctgagcttccctaagagtgcttgcgcattgactagtacatgaccacttga

SEQ ID NO: 42398 - DNA, 53 bp, Artificial Sequence
  Description of Artificial Sequence: Synthetic gluten; inner sequence and 3'  sequence
tgaccgactcgaaccaggcatgactcggcattgactagtacatgaccacttga

SEQ ID NO: 42399 - DNA, 53 bp, Artificial Sequence
  Description of Artificial Sequence: Synthetic gluten; inner sequence and 3'  sequence
tggacgacgattcccttggcaagctccgctttgactagtacatgaccacttga

SEQ ID NO: 42400 - DNA, 53 bp, Artificial Sequence
  Description of Artificial Sequence: Synthetic gluten; inner sequence and 3'  sequence
ggactcgcgtcactatcacgggggcaggtattgactagtacatgaccacttga

SEQ ID NO: 42401 - DNA, 54 bp, Artificial Sequence
  Description of Artificial Sequence: Synthetic gluten; inner sequence and 3'  sequence
gtacgacgcgaacctatcaagggctcatggattgactagtacatgaccacttga

SEQ ID NO: 42402 - DNA, 53 bp, Artificial Sequence
  Description of Artificial Sequence: Synthetic gluten; inner sequence and 3'  sequence
tcgcgatgaccgaggaaatgtacgacggcattgactagtacatgaccacttga

SEQ ID NO: 42403 - DNA, 53 bp, Artificial Sequence
  Description of Artificial Sequence: Synthetic gluten; inner sequence and 3'  sequence
ggcatgatcgaaccgctagtgtgtcagggattgactagtacatgaccacttga

SEQ ID NO: 42404 - DNA, 52 bp, Artificial Sequence
  Description of Artificial Sequence: Synthetic gluten; inner sequence and 3'  sequence
ggcatgcgatggatgtggctggtgcttgcttgactagtacatgaccacttga

SEQ ID NO: 42405 - DNA, 53 bp, Artificial Sequence
  Description of Artificial Sequence: Synthetic gluten; inner sequence and 3'  sequence
ggcattcgatgcactacaagttgttgcgtattgactagtacatgaccacttga

SEQ ID NO: 42406 - DNA, 53 bp, Artificial Sequence
  Description of Artificial Sequence: Synthetic gluten; inner sequence and 3'  sequence
ccgactcgacctgaatgtaataggagtgaattgactagtacatgaccacttga

SEQ ID NO: 42407 - DNA, 53 bp, Artificial Sequence
  Description of Artificial Sequence: Synthetic gluten; inner sequence and 3'  sequence
tggcacacaagcatatcgcacttatctggattgactagtacatgaccacttga

SEQ ID NO: 42408 - DNA, 53 bp, Artificial Sequence
  Description of Artificial Sequence: Synthetic gluten; inner sequence and 3'  sequence
ctgacctagcaactgtggcacgcaatttgattgactagtacatgaccacttga

SEQ ID NO: 42409 - DNA, 53 bp, Artificial Sequence
  Description of Artificial Sequence: Synthetic gluten; inner sequence and 3'  sequence
catgtacccacgatagtcctgaggagcatattgactagtacatgaccacttga

SEQ ID NO: 42410 - DNA, 53 bp, Artificial Sequence
  Description of Artificial Sequence: Synthetic gluten; inner sequence and 3'  sequence
catatggacgccgatgaactagtacgggcattgactagtacatgaccacttga

SEQ ID NO: 42411 - DNA, 53 bp, Artificial Sequence
  Description of Artificial Sequence: Synthetic gluten; inner sequence and 3'  sequence
gtacgacactgcaccttcaagtgtgatgtattgactagtacatgaccacttga

SEQ ID NO: 42412 - DNA, 53 bp, Artificial Sequence; identical to SEQ ID NO: 6598
  Description of Artificial Sequence: Synthetic gluten; inner sequence and 3'  sequence

SEQ ID NO: 42413 - DNA, 53 bp, Artificial Sequence; identical to SEQ ID NO: 6555
  Description of Artificial Sequence: Synthetic gluten; inner sequence and 3'  sequence

SEQ ID NO: 42414 - DNA, 53 bp, Artificial Sequence
  Description of Artificial Sequence: Synthetic gluten; inner sequence and 3'  sequence
gacctgatcgaacctagagagtggcgtggattgactagtacatgaccacttga

SEQ ID NO: 42415 - DNA, 53 bp, Artificial Sequence
  Description of Artificial Sequence: Synthetic gluten; inner sequence and 3'  sequence
ggacgaactgaactaaagtggggtacgacgttgactagtacatgaccacttga

SEQ ID NO: 42416 - DNA, 53 bp, Artificial Sequence
  Description of Artificial Sequence: Synthetic gluten; inner sequence and 3'  sequence
cctgagctgcactaggacggcaattccaaattgactagtacatgaccacttga

SEQ ID NO: 42417 - DNA, 53 bp, Artificial Sequence
  Description of Artificial Sequence: Synthetic gluten; inner sequence and 3'  sequence
catgtacgctcataaaggctcgcactcatattgactagtacatgaccacttga

SEQ ID NO: 42418 - DNA, 53 bp, Artificial Sequence
  Description of Artificial Sequence: Synthetic gluten; inner sequence and 3'  sequence
ccgtacgattcgctgcaatgtgctcatggattgactagtacatgaccacttga

SEQ ID NO: 42419 - DNA, 53 bp, Artificial Sequence; identical to SEQ ID NO: 2112
  Description of Artificial Sequence: Synthetic gluten; inner sequence and 3'  sequence

SEQ ID NO: 42420 - DNA, 52 bp, Artificial Sequence
  Description of Artificial Sequence: Synthetic gluten; inner sequence and 3'  sequence
ttcgcagaaagcacgtgatcaacgcgcacttgactagtacatgaccacttga

SEQ ID NO: 42421 - DNA, 53 bp, Artificial Sequence
  Description of Artificial Sequence: Synthetic gluten; inner sequence and 3'  sequence
cgaccctgttgagagccgaagatctgcaatttgactagtacatgaccacttga

SEQ ID NO: 42422 - DNA, 53 bp, Artificial Sequence
  Description of Artificial Sequence: Synthetic gluten; inner sequence and 3'  sequence
gcacgacgatgactgaaagtgtccatgtgcttgactagtacatgaccacttga

SEQ ID NO: 42423 - DNA, 53 bp, Artificial Sequence
  Description of Artificial Sequence: Synthetic gluten; inner sequence and 3'  sequence
tcatatggccaatgacgccctgtacgtgtcttgactagtacatgaccacttga

SEQ ID NO: 42424 - DNA, 53 bp, Artificial Sequence
  Description of Artificial Sequence: Synthetic gluten; inner sequence and 3'  sequence
ggcctgaacgcgcctatcaatgcgtctgtattgactagtacatgaccacttga

SEQ ID NO: 42425 - DNA, 53 bp, Artificial Sequence
  Description of Artificial Sequence: Synthetic gluten; inner sequence and 3'  sequence
tgaagtgacacaagagccgaagatacagtattgactagtacatgaccacttga

SEQ ID NO: 42426 - DNA, 53 bp, Artificial Sequence
  Description of Artificial Sequence: Synthetic gluten; inner sequence and 3'  sequence
gtactgctctggcacgaagatgctgcgtcattgactagtacatgaccacttga

SEQ ID NO: 42427 - DNA, 53 bp, Artificial Sequence
  Description of Artificial Sequence: Synthetic gluten; inner sequence and 3'  sequence
gtgctgcgatgaccgatgaaggcactaggcttgactagtacatgaccacttga

SEQ ID NO: 42428 - DNA, 53 bp, Artificial Sequence
  Description of Artificial Sequence: Synthetic gluten; inner sequence and 3'  sequence
ggccaccctcatcccttgggcatgcacgacttgactagtacatgaccacttga

SEQ ID NO: 42429 - DNA, 53 bp, Artificial Sequence
  Description of Artificial Sequence: Synthetic gluten; inner sequence and 3'  sequence
gactgaacggaaacaagtggaagtggcgtcttgactagtacatgaccacttga

SEQ ID NO: 42430 - DNA, 53 bp, Artificial Sequence
  Description of Artificial Sequence: Synthetic gluten; inner sequence and 3'  sequence
cgtcatgccatagaaatcgtggaccgtgccttgactagtacatgaccacttga

SEQ ID NO: 42431 - DNA, 53 bp, Artificial Sequence
  Description of Artificial Sequence: Synthetic gluten; inner sequence and 3'  sequence
gtcatgccgtcccgtacaagtcgtcagggattgactagtacatgaccacttga

SEQ ID NO: 42432 - DNA, 53 bp, Artificial Sequence
  Description of Artificial Sequence: Synthetic gluten; inner sequence and 3'  sequence
tggactcgctgaacctaccaagaacatgtcttgactagtacatgaccacttga

SEQ ID NO: 42433 - DNA, 53 bp, Artificial Sequence
  Description of Artificial Sequence: Synthetic gluten; inner sequence and 3'  sequence
tgtccgaagcaaccggcaatggacgacgtcttgactagtacatgaccacttga

SEQ ID NO: 42434 - DNA, 53 bp, Artificial Sequence
  Description of Artificial Sequence: Synthetic gluten; inner sequence and 3'  sequence
gtacgacgcggaccttcaagtaggcgtggattgactagtacatgaccacttga

SEQ ID NO: 42435 - DNA, 54 bp, Artificial Sequence
  Description of Artificial Sequence: Synthetic gluten; inner sequence and 3'  sequence
gtacgacgcggacctgtcatggatgggcacattgactagtacatgaccacttga

SEQ ID NO: 42436 - DNA, 53 bp, Artificial Sequence
  Description of Artificial Sequence: Synthetic gluten; inner sequence and 3'  sequence
gtcatgctcggatgtgggctttacggtccattgactagtacatgaccacttga

SEQ ID NO: 42437 - DNA, 53 bp, Artificial Sequence
  Description of Artificial Sequence: Synthetic gluten; inner sequence and 3'  sequence
atcatcaggtggacgaatcggaacgtgggattgactagtacatgaccacttga

SEQ ID NO: 42438 - DNA, 52 bp, Artificial Sequence
  Description of Artificial Sequence: Synthetic gluten; inner sequence and 3'  sequence
gtacgcagctgacctcaagtgctcgtggcttgactagtacatgaccacttga

SEQ ID NO: 42439 - DNA, 53 bp, Artificial Sequence
  Description of Artificial Sequence: Synthetic gluten; inner sequence and 3'  sequence
ggcccgagctggatgtggcttgaacgtgtcttgactagtacatgaccacttga

SEQ ID NO: 42440 - DNA, 53 bp, Artificial Sequence
  Description of Artificial Sequence: Synthetic gluten; inner sequence and 3'  sequence
tcatgtccgtcacgcagcatcaagtgcgaattgactagtacatgaccacttga

SEQ ID NO: 42441 - DNA, 53 bp, Artificial Sequence
  Description of Artificial Sequence: Synthetic gluten; inner sequence and 3'  sequence
cctgcgaagccctgtagaccatgcacgtgcttgactagtacatgaccacttga

SEQ ID NO: 42442 - DNA, 53 bp, Artificial Sequence
  Description of Artificial Sequence: Synthetic gluten; inner sequence and 3'  sequence
caacatagctgccgaacggaatgactcacgttgactagtacatgaccacttga

SEQ ID NO: 42443 - DNA, 53 bp, Artificial Sequence; identical to SEQ ID NO: 6801
  Description of Artificial Sequence: Synthetic gluten; inner sequence and 3'  sequence

SEQ ID NO: 42444 - DNA, 53 bp, Artificial Sequence
  Description of Artificial Sequence: Synthetic gluten; inner sequence and 3'  sequence
ggcctgagctgaccgaatgtgcgcgctgtcttgactagtacatgaccacttga

SEQ ID NO: 42445 - DNA, 53 bp, Artificial Sequence
  Description of Artificial Sequence: Synthetic gluten; inner sequence and 3'  sequence
tggccgagcgaaccgaagtactgtcagacattgactagtacatgaccacttga

SEQ ID NO: 42446 - DNA, 53 bp, Artificial Sequence; identical to SEQ ID NO: 30922
  Description of Artificial Sequence: Synthetic gluten; inner sequence and 3'  sequence

SEQ ID NO: 42447 - DNA, 53 bp, Artificial Sequence
  Description of Artificial Sequence: Synthetic gluten; inner sequence and 3'  sequence
catgtacagatcgaagcgaatctcggcatattgactagtacatgaccacttga

SEQ ID NO: 42448 - DNA, 53 bp, Artificial Sequence
  Description of Artificial Sequence: Synthetic gluten; inner sequence and 3'  sequence
acagatgcacgacgacttccctaattggcattgactagtacatgaccacttga

SEQ ID NO: 42449 - DNA, 53 bp, Artificial Sequence
  Description of Artificial Sequence: Synthetic gluten; inner sequence and 3'  sequence
gcaccacgtgctagcaatggaccgactggattgactagtacatgaccacttga

SEQ ID NO: 42450 - DNA, 53 bp, Artificial Sequence
  Description of Artificial Sequence: Synthetic gluten; inner sequence and 3'  sequence
aatgtgcccggatcggaacgtggccatgtattgactagtacatgaccacttga

SEQ ID NO: 42451 - DNA, 53 bp, Artificial Sequence
  Description of Artificial Sequence: Synthetic gluten; inner sequence and 3'  sequence
caactcacgtgcctcggcttgctcatttagttgactagtacatgaccacttga

SEQ ID NO: 42452 - DNA, 52 bp, Artificial Sequence
  Description of Artificial Sequence: Synthetic gluten; inner sequence and 3'  sequence
ggccgagcttcccttaagatcaggcacacttgactagtacatgaccacttga

SEQ ID NO: 42453 - DNA, 53 bp, Artificial Sequence
  Description of Artificial Sequence: Synthetic gluten; inner sequence and 3'  sequence
cctgcgatgactaacggaataggcaacatgttgactagtacatgaccacttga

SEQ ID NO: 42454 - DNA, 53 bp, Artificial Sequence
  Description of Artificial Sequence: Synthetic gluten; inner sequence and 3'  sequence
agaaccagcctgaaggagcgagtgtacgagttgactagtacatgaccacttga

SEQ ID NO: 42455 - DNA, 53 bp, Artificial Sequence
  Description of Artificial Sequence: Synthetic gluten; inner sequence and 3'  sequence
catgatcgcaccgaatagatcaggtacgtattgactagtacatgaccacttga

SEQ ID NO: 42456 - DNA, 53 bp, Artificial Sequence
  Description of Artificial Sequence: Synthetic gluten; inner sequence and 3'  sequence
cgcaacgcagaaacgtataagggtggatcgttgactagtacatgaccacttga

SEQ ID NO: 42457 - DNA, 53 bp, Artificial Sequence
  Description of Artificial Sequence: Synthetic gluten; inner sequence and 3'  sequence
catggcggatacagctggaagacaggcatattgactagtacatgaccacttga

SEQ ID NO: 42458 - DNA, 53 bp, Artificial Sequence
  Description of Artificial Sequence: Synthetic gluten; inner sequence and 3'  sequence
cggaacgagcatatcaaacacgtggtggttttgactagtacatgaccacttga

SEQ ID NO: 42459 - DNA, 53 bp, Artificial Sequence
  Description of Artificial Sequence: Synthetic gluten; inner sequence and 3'  sequence
cctgctcggacctatcatggacggcattcattgactagtacatgaccacttga

SEQ ID NO: 42460 - DNA, 53 bp, Artificial Sequence
  Description of Artificial Sequence: Synthetic gluten; inner sequence and 3'  sequence
catggacgtaactaagcaaacttggccatattgactagtacatgaccacttga

SEQ ID NO: 42461 - DNA, 53 bp, Artificial Sequence
  Description of Artificial Sequence: Synthetic gluten; inner sequence and 3'  sequence
gtcaagagcgacccttcatgaggacatggattgactagtacatgaccacttga

SEQ ID NO: 42462 - DNA, 53 bp, Artificial Sequence
  Description of Artificial Sequence: Synthetic gluten; inner sequence and 3'  sequence
catgtacgaaacaaggactgggtctcattattgactagtacatgaccacttga

SEQ ID NO: 42463 - DNA, 53 bp, Artificial Sequence
  Description of Artificial Sequence: Synthetic gluten; inner sequence and 3'  sequence
gtccatagcttgccttcaagggagcgtggattgactagtacatgaccacttga

SEQ ID NO: 42464 - DNA, 53 bp, Artificial Sequence
  Description of Artificial Sequence: Synthetic gluten; inner sequence and 3'  sequence
aggatgcacgaacttccctacatgtggacattgactagtacatgaccacttga

SEQ ID NO: 42465 - DNA, 53 bp, Artificial Sequence; identical to SEQ ID NO: 2201
  Description of Artificial Sequence: Synthetic gluten; inner sequence and 3'  sequence

SEQ ID NO: 42466 - DNA, 53 bp, Artificial Sequence
  Description of Artificial Sequence: Synthetic gluten; inner sequence and 3'  sequence
catgtcgttagaaagcatcccaatgtcatattgactagtacatgaccacttga

SEQ ID NO: 42467 - DNA, 53 bp, Artificial Sequence
  Description of Artificial Sequence: Synthetic gluten; inner sequence and 3'  sequence
catgtgcgattcgacgtgcatccgttcatattgactagtacatgaccacttga

SEQ ID NO: 42468 - DNA, 53 bp, Artificial Sequence; identical to SEQ ID NO: 2161
  Description of Artificial Sequence: Synthetic gluten; inner sequence and 3'  sequence

SEQ ID NO: 42469 - DNA, 53 bp, Artificial Sequence
  Description of Artificial Sequence: Synthetic gluten; inner sequence and 3'  sequence
ggccgaatcgaacctaggacatgtcgcgtattgactagtacatgaccacttga

SEQ ID NO: 42470 - DNA, 53 bp, Artificial Sequence; identical to SEQ ID NO: 2472
  Description of Artificial Sequence: Synthetic gluten; inner sequence and 3'  sequence

SEQ ID NO: 42471 - DNA, 53 bp, Artificial Sequence; identical to SEQ ID NO: 30472
  Description of Artificial Sequence: Synthetic gluten; inner sequence and 3'  sequence

SEQ ID NO: 42472 - DNA, 53 bp, Artificial Sequence
  Description of Artificial Sequence: Synthetic gluten; inner sequence and 3'  sequence
cttcccacaagctggtaggggacgaggccattgactagtacatgaccacttga

SEQ ID NO: 42473 - DNA, 52 bp, Artificial Sequence
  Description of Artificial Sequence: Synthetic gluten; inner sequence and 3'  sequence
ggcctgcgatggatgtggcatgctctggcttgactagtacatgaccacttga

SEQ ID NO: 42474 - DNA, 53 bp, Artificial Sequence; identical to SEQ ID NO: 2106
  Description of Artificial Sequence: Synthetic gluten; inner sequence and 3'  sequence

SEQ ID NO: 42475 - DNA, 53 bp, Artificial Sequence; identical to SEQ ID NO: 2245
  Description of Artificial Sequence: Synthetic gluten; inner sequence and 3'  sequence

SEQ ID NO: 42476 - DNA, 53 bp, Artificial Sequence
  Description of Artificial Sequence: Synthetic gluten; inner sequence and 3'  sequence
gcatatgcactgcgcgaccctcaagtgacattgactagtacatgaccacttga

SEQ ID NO: 42477 - DNA, 53 bp, Artificial Sequence
  Description of Artificial Sequence: Synthetic gluten; inner sequence and 3'  sequence
ggcatgagctgcctacaagatggggatgtattgactagtacatgaccacttga

SEQ ID NO: 42478 - DNA, 53 bp, Artificial Sequence; identical to SEQ ID NO: 2046
  Description of Artificial Sequence: Synthetic gluten; inner sequence and 3'  sequence

SEQ ID NO: 42479 - DNA, 53 bp, Artificial Sequence
  Description of Artificial Sequence: Synthetic gluten; inner sequence and 3'  sequence
acgtatcgaacctagcgagtgtgtcgtggattgactagtacatgaccacttga

SEQ ID NO: 42480 - DNA, 54 bp, Artificial Sequence
  Description of Artificial Sequence: Synthetic gluten; inner sequence and 3'  sequence
tgtactgagcggatgtggactgcacgtaggcttgactagtacatgaccacttga

SEQ ID NO: 42481 - DNA, 53 bp, Artificial Sequence; identical to SEQ ID NO: 2321
  Description of Artificial Sequence: Synthetic gluten; inner sequence and 3'  sequence

SEQ ID NO: 42482 - DNA, 53 bp, Artificial Sequence; identical to SEQ ID NO: 2186
  Description of Artificial Sequence: Synthetic gluten; inner sequence and 3'  sequence

SEQ ID NO: 42483 - DNA, 53 bp, Artificial Sequence; identical to SEQ ID NO: 38643
  Description of Artificial Sequence: Synthetic gluten; inner sequence and 3'  sequence

SEQ ID NO: 42484 - DNA, 53 bp, Artificial Sequence; identical to SEQ ID NO: 2401
  Description of Artificial Sequence: Synthetic gluten; inner sequence and 3'  sequence

SEQ ID NO: 42485 - DNA, 53 bp, Artificial Sequence
  Description of Artificial Sequence: Synthetic gluten; inner sequence and 3'  sequence
gctccgaacgacccttgtagtgtcaatccattgactagtacatgaccacttga

SEQ ID NO: 42486 - DNA, 53 bp, Artificial Sequence; identical to SEQ ID NO: 2611
  Description of Artificial Sequence: Synthetic gluten; inner sequence and 3'  sequence

SEQ ID NO: 42487 - DNA, 53 bp, Artificial Sequence
  Description of Artificial Sequence: Synthetic gluten; inner sequence and 3'  sequence
tggccgatcgaccctatcaagagcagcatgttgactagtacatgaccacttga

SEQ ID NO: 42488 - DNA, 53 bp, Artificial Sequence
  Description of Artificial Sequence: Synthetic gluten; inner sequence and 3'  sequence
gtcatatggccgaagcgagaacagctatgtttgactagtacatgaccacttga

SEQ ID NO: 42489 - DNA, 53 bp, Artificial Sequence
  Description of Artificial Sequence: Synthetic gluten; inner sequence and 3'  sequence
tcatcataggaacgagctgacctcggcatgttgactagtacatgaccacttga

SEQ ID NO: 42490 - DNA, 53 bp, Artificial Sequence; identical to SEQ ID NO: 2359
  Description of Artificial Sequence: Synthetic gluten; inner sequence and 3'  sequence

SEQ ID NO: 42491 - DNA, 53 bp, Artificial Sequence; identical to SEQ ID NO: 2698
  Description of Artificial Sequence: Synthetic gluten; inner sequence and 3'  sequence

SEQ ID NO: 42492 - DNA, 51 bp, Artificial Sequence
  Description of Artificial Sequence: Synthetic gluten; inner sequence and 3'  sequence
ccgagagagccgaagaaccaggcaatgattgactagtacatgaccacttga

SEQ ID NO: 42493 - DNA, 53 bp, Artificial Sequence; identical to SEQ ID NO: 2301
  Description of Artificial Sequence: Synthetic gluten; inner sequence and 3'  sequence

SEQ ID NO: 42494 - DNA, 53 bp, Artificial Sequence
  Description of Artificial Sequence: Synthetic gluten; inner sequence and 3'  sequence
catgtaacgataggcaacaatgttgtcatattgactagtacatgaccacttga

SEQ ID NO: 42495 - DNA, 53 bp, Artificial Sequence
  Description of Artificial Sequence: Synthetic gluten; inner sequence and 3'  sequence
acgatcgaacctatcatgacgcgggctatattgactagtacatgaccacttga

SEQ ID NO: 42496 - DNA, 53 bp, Artificial Sequence
  Description of Artificial Sequence: Synthetic gluten; inner sequence and 3'  sequence
ggcatgcgctgggtagtgatcacgtacggattgactagtacatgaccacttga

SEQ ID NO: 42497 - DNA, 53 bp, Artificial Sequence
  Description of Artificial Sequence: Synthetic gluten; inner sequence and 3'  sequence
tggcatgcgagtcactagtctgtactggccttgactagtacatgaccacttga

SEQ ID NO: 42498 - DNA, 53 bp, Artificial Sequence
  Description of Artificial Sequence: Synthetic gluten; inner sequence and 3'  sequence
ccgaacgaacctgtcgatcgaagcttcgcattgactagtacatgaccacttga

SEQ ID NO: 42499 - DNA, 53 bp, Artificial Sequence; identical to SEQ ID NO: 30497
  Description of Artificial Sequence: Synthetic gluten; inner sequence and 3'  sequence

SEQ ID NO: 42500 - DNA, 53 bp, Artificial Sequence
  Description of Artificial Sequence: Synthetic gluten; inner sequence and 3'  sequence
ggccacacgattccctcaagtcgttatgtattgactagtacatgaccacttga

SEQ ID NO: 42501 - DNA, 53 bp, Artificial Sequence
  Description of Artificial Sequence: Synthetic gluten; inner sequence and 3'  sequence
ctccgcgaagtacctcaacaaacgttcggcttgactagtacatgaccacttga

SEQ ID NO: 42502 - DNA, 53 bp, Artificial Sequence
  Description of Artificial Sequence: Synthetic gluten; inner sequence and 3'  sequence
cgtaccagagccgacgattctgtcaatgtattgactagtacatgaccacttga

SEQ ID NO: 42503 - DNA, 53 bp, Artificial Sequence; identical to SEQ ID NO: 2109
  Description of Artificial Sequence: Synthetic gluten; inner sequence and 3'  sequence

SEQ ID NO: 42504 - DNA, 53 bp, Artificial Sequence; identical to SEQ ID NO: 38861
  Description of Artificial Sequence: Synthetic gluten; inner sequence and 3'  sequence

SEQ ID NO: 42505 - DNA, 53 bp, Artificial Sequence
  Description of Artificial Sequence: Synthetic gluten; inner sequence and 3'  sequence
ggacgacgcgacctacgagtgagacatggattgactagtacatgaccacttga

SEQ ID NO: 42506 - DNA, 53 bp, Artificial Sequence
  Description of Artificial Sequence: Synthetic gluten; inner sequence and 3'  sequence
ggacgacgcggaccttcaagtaggcgtgtattgactagtacatgaccacttga

SEQ ID NO: 42507 - DNA, 53 bp, Artificial Sequence
  Description of Artificial Sequence: Synthetic gluten; inner sequence and 3'  sequence
cacggtgcgaagctatgtctcatcaacgcattgactagtacatgaccacttga

SEQ ID NO: 42508 - DNA, 53 bp, Artificial Sequence
  Description of Artificial Sequence: Synthetic gluten; inner sequence and 3'  sequence
gtcaatcacatgttctttagagccctcgtgttgactagtacatgaccacttga

SEQ ID NO: 42509 - DNA, 53 bp, Artificial Sequence
  Description of Artificial Sequence: Synthetic gluten; inner sequence and 3'  sequence
gtactgcctggatgttgacatgcacttgtcttgactagtacatgaccacttga

SEQ ID NO: 42510 - DNA, 53 bp, Artificial Sequence; identical to SEQ ID NO: 6884
  Description of Artificial Sequence: Synthetic gluten; inner sequence and 3'  sequence

SEQ ID NO: 42511 - DNA, 53 bp, Artificial Sequence
  Description of Artificial Sequence: Synthetic gluten; inner sequence and 3'  sequence
gtcactctcaagctatcaagtgcgaaggtattgactagtacatgaccacttga

SEQ ID NO: 42512 - DNA, 53 bp, Artificial Sequence
  Description of Artificial Sequence: Synthetic gluten; inner sequence and 3'  sequence
catgtccggaacgaccacttgagcgtgtcattgactagtacatgaccacttga

SEQ ID NO: 42513 - DNA, 53 bp, Artificial Sequence
  Description of Artificial Sequence: Synthetic gluten; inner sequence and 3'  sequence
tggcatgcgatcccctgacagtacttgagcttgactagtacatgaccacttga

SEQ ID NO: 42514 - DNA, 53 bp, Artificial Sequence
  Description of Artificial Sequence: Synthetic gluten; inner sequence and 3'  sequence
ggcatgcgacttcccttagatccgtacagcttgactagtacatgaccacttga

SEQ ID NO: 42515 - DNA, 53 bp, Artificial Sequence
  Description of Artificial Sequence: Synthetic gluten; inner sequence and 3'  sequence
cctgagcgcaccctcgtcatgcagctagacttgactagtacatgaccacttga

SEQ ID NO: 42516 - DNA, 53 bp, Artificial Sequence
  Description of Artificial Sequence: Synthetic gluten; inner sequence and 3'  sequence
gcccaaacgaccttcaagatggatcgtgtattgactagtacatgaccacttga

SEQ ID NO: 42517 - DNA, 53 bp, Artificial Sequence; identical to SEQ ID NO: 2312
  Description of Artificial Sequence: Synthetic gluten; inner sequence and 3'  sequence

SEQ ID NO: 42518 - DNA, 53 bp, Artificial Sequence
  Description of Artificial Sequence: Synthetic gluten; inner sequence and 3'  sequence
gtgccgaagttgcctacaagtgcgagtgtattgactagtacatgaccacttga

SEQ ID NO: 42519 - DNA, 53 bp, Artificial Sequence
  Description of Artificial Sequence: Synthetic gluten; inner sequence and 3'  sequence
cgtaccgcaagagacgtgtccgtgccgtgattgactagtacatgaccacttga

SEQ ID NO: 42520 - DNA, 53 bp, Artificial Sequence
  Description of Artificial Sequence: Synthetic gluten; inner sequence and 3'  sequence
atggcctgcgtatgaccgtcagagcatggattgactagtacatgaccacttga

SEQ ID NO: 42521 - DNA, 53 bp, Artificial Sequence
  Description of Artificial Sequence: Synthetic gluten; inner sequence and 3'  sequence
aatgcatcagtgtcaaatgcgttcaagatgttgactagtacatgaccacttga

SEQ ID NO: 42522 - DNA, 54 bp, Artificial Sequence
  Description of Artificial Sequence: Synthetic gluten; inner sequence and 3'  sequence
ggcctgcgatggatgttgacatgcacttgtcttgactagtacatgaccacttga

SEQ ID NO: 42523 - DNA, 53 bp, Artificial Sequence
  Description of Artificial Sequence: Synthetic gluten; inner sequence and 3'  sequence
cattcgcgacctaaacgtgacatggacggattgactagtacatgaccacttga

SEQ ID NO: 42524 - DNA, 53 bp, Artificial Sequence
  Description of Artificial Sequence: Synthetic gluten; inner sequence and 3'  sequence
tgtacgtcgcgacctacatgtgctgcatcattgactagtacatgaccacttga

SEQ ID NO: 42525 - DNA, 53 bp, Artificial Sequence
  Description of Artificial Sequence: Synthetic gluten; inner sequence and 3'  sequence
gtgcgcgaaaacctatcacgtgatcatggattgactagtacatgaccacttga

SEQ ID NO: 42526 - DNA, 53 bp, Artificial Sequence
  Description of Artificial Sequence: Synthetic gluten; inner sequence and 3'  sequence
atcacgcatagggacttcgatggcacgtcattgactagtacatgaccacttga

SEQ ID NO: 42527 - DNA, 53 bp, Artificial Sequence
  Description of Artificial Sequence: Synthetic gluten; inner sequence and 3'  sequence
tgacgaacgcaacctatagaacatgtcgtattgactagtacatgaccacttga

SEQ ID NO: 42528 - DNA, 53 bp, Artificial Sequence
  Description of Artificial Sequence: Synthetic gluten; inner sequence and 3'  sequence
ggacggatcgaacctacaagctgtcgtggattgactagtacatgaccacttga

SEQ ID NO: 42529 - DNA, 53 bp, Artificial Sequence; identical to SEQ ID NO: 2198
  Description of Artificial Sequence: Synthetic gluten; inner sequence and 3'  sequence

SEQ ID NO: 42530 - DNA, 53 bp, Artificial Sequence; identical to SEQ ID NO: 2168
  Description of Artificial Sequence: Synthetic gluten; inner sequence and 3'  sequence

SEQ ID NO: 42531 - DNA, 53 bp, Artificial Sequence
  Description of Artificial Sequence: Synthetic gluten; inner sequence and 3'  sequence
caaacgcagtgagcatatggcataagtgggttgactagtacatgaccacttga

SEQ ID NO: 42532 - DNA, 53 bp, Artificial Sequence
  Description of Artificial Sequence: Synthetic gluten; inner sequence and 3'  sequence
gtactgcgcgaccctaaagtgataggcatgttgactagtacatgaccacttga

SEQ ID NO: 42533 - DNA, 52 bp, Artificial Sequence
  Description of Artificial Sequence: Synthetic gluten; inner sequence and 3'  sequence
acgaatgagccgaagatacaatgtcagtattgactagtacatgaccacttga

SEQ ID NO: 42534 - DNA, 52 bp, Artificial Sequence
  Description of Artificial Sequence: Synthetic gluten; inner sequence and 3'  sequence
tgagctagcgagaaccgaagatacagggattgactagtacatgaccacttga

SEQ ID NO: 42535 - DNA, 53 bp, Artificial Sequence
  Description of Artificial Sequence: Synthetic gluten; inner sequence and 3'  sequence
gactgaacgaccgaaaggggacatgacgagttgactagtacatgaccacttga

SEQ ID NO: 42536 - DNA, 53 bp, Artificial Sequence
  Description of Artificial Sequence: Synthetic gluten; inner sequence and 3'  sequence
tcatgtgtcacgaagccctacaagtcgtcattgactagtacatgaccacttga

SEQ ID NO: 42537 - DNA, 53 bp, Artificial Sequence
  Description of Artificial Sequence: Synthetic gluten; inner sequence and 3'  sequence
cctgagcgaacctgtcaacatcacggagcattgactagtacatgaccacttga

SEQ ID NO: 42538 - DNA, 53 bp, Artificial Sequence; identical to SEQ ID NO: 2126
  Description of Artificial Sequence: Synthetic gluten; inner sequence and 3'  sequence

SEQ ID NO: 42539 - DNA, 53 bp, Artificial Sequence
  Description of Artificial Sequence: Synthetic gluten; inner sequence and 3'  sequence
cacgtcacagggccgacctctcatgaactattgactagtacatgaccacttga

SEQ ID NO: 42540 - DNA, 53 bp, Artificial Sequence
  Description of Artificial Sequence: Synthetic gluten; inner sequence and 3'  sequence
caatagagccgaagagcaatgtcaacgagtttgactagtacatgaccacttga

SEQ ID NO: 42541 - DNA, 53 bp, Artificial Sequence
  Description of Artificial Sequence: Synthetic gluten; inner sequence and 3'  sequence
cgcaacggaagtaaaatcagttccgaaacgttgactagtacatgaccacttga

SEQ ID NO: 42542 - DNA, 53 bp, Artificial Sequence
  Description of Artificial Sequence: Synthetic gluten; inner sequence and 3'  sequence
cggcagtcgtaaacgaatcggctaggcatattgactagtacatgaccacttga

SEQ ID NO: 42543 - DNA, 53 bp, Artificial Sequence
  Description of Artificial Sequence: Synthetic gluten; inner sequence and 3'  sequence
tcactcgtgtccaacctcccttcgtggacattgactagtacatgaccacttga

SEQ ID NO: 42544 - DNA, 52 bp, Artificial Sequence
  Description of Artificial Sequence: Synthetic gluten; inner sequence and 3'  sequence
atgatcctgcacgaccaaagttggccatgttgactagtacatgaccacttga

SEQ ID NO: 42545 - DNA, 53 bp, Artificial Sequence
  Description of Artificial Sequence: Synthetic gluten; inner sequence and 3'  sequence
tgatcgcatggacgtcgatggatgtgggcattgactagtacatgaccacttga

SEQ ID NO: 42546 - DNA, 53 bp, Artificial Sequence
  Description of Artificial Sequence: Synthetic gluten; inner sequence and 3'  sequence
ccgaacgaccgggaatgaacgtgtcagaaattgactagtacatgaccacttga

SEQ ID NO: 42547 - DNA, 53 bp, Artificial Sequence
  Description of Artificial Sequence: Synthetic gluten; inner sequence and 3'  sequence
catgtacggacgaggcattgcgtgctcatattgactagtacatgaccacttga

SEQ ID NO: 42548 - DNA, 53 bp, Artificial Sequence
  Description of Artificial Sequence: Synthetic gluten; inner sequence and 3'  sequence
tgaccgatcgaccctatcaagtgcagcatgttgactagtacatgaccacttga

SEQ ID NO: 42549 - DNA, 53 bp, Artificial Sequence
  Description of Artificial Sequence: Synthetic gluten; inner sequence and 3'  sequence
ccgatcgacctgaatgtgcgtggcaattgattgactagtacatgaccacttga

SEQ ID NO: 42550 - DNA, 53 bp, Artificial Sequence
  Description of Artificial Sequence: Synthetic gluten; inner sequence and 3'  sequence
gacgatgctgaccgtcaagggagtcacgtattgactagtacatgaccacttga

SEQ ID NO: 42551 - DNA, 53 bp, Artificial Sequence
  Description of Artificial Sequence: Synthetic gluten; inner sequence and 3'  sequence
tgaacaagcataggacgacacgcagtcatattgactagtacatgaccacttga

SEQ ID NO: 42552 - DNA, 53 bp, Artificial Sequence
  Description of Artificial Sequence: Synthetic gluten; inner sequence and 3'  sequence
ggactgcacgaccgatagagcatggactgtttgactagtacatgaccacttga

SEQ ID NO: 42553 - DNA, 53 bp, Artificial Sequence
  Description of Artificial Sequence: Synthetic gluten; inner sequence and 3'  sequence
catccaccgatagcgaatatggcctggatcttgactagtacatgaccacttga

SEQ ID NO: 42554 - DNA, 53 bp, Artificial Sequence; identical to SEQ ID NO: 14939
  Description of Artificial Sequence: Synthetic gluten; inner sequence and 3'  sequence

SEQ ID NO: 42555 - DNA, 53 bp, Artificial Sequence
  Description of Artificial Sequence: Synthetic gluten; inner sequence and 3'  sequence
atgtacggatcgaacgtggtagtgtgcgcattgactagtacatgaccacttga

SEQ ID NO: 42556 - DNA, 53 bp, Artificial Sequence
  Description of Artificial Sequence: Synthetic gluten; inner sequence and 3'  sequence
cgacacgctacctgtgatctggacttggcattgactagtacatgaccacttga

SEQ ID NO: 42557 - DNA, 53 bp, Artificial Sequence
  Description of Artificial Sequence: Synthetic gluten; inner sequence and 3'  sequence
tgcaacggcaccgtagattccacaacagtgttgactagtacatgaccacttga

SEQ ID NO: 42558 - DNA, 53 bp, Artificial Sequence
  Description of Artificial Sequence: Synthetic gluten; inner sequence and 3'  sequence
ctcagcgcaaagaccttcaatgcgatcggcttgactagtacatgaccacttga

SEQ ID NO: 42559 - DNA, 54 bp, Artificial Sequence
  Description of Artificial Sequence: Synthetic gluten; inner sequence and 3'  sequence
tggcctgatcgaacctagagagtggcgtggattgactagtacatgaccacttga

SEQ ID NO: 42560 - DNA, 53 bp, Artificial Sequence
  Description of Artificial Sequence: Synthetic gluten; inner sequence and 3'  sequence
cgacacgatggccttactgtgagcgggtcattgactagtacatgaccacttga

SEQ ID NO: 42561 - DNA, 53 bp, Artificial Sequence
  Description of Artificial Sequence: Synthetic gluten; inner sequence and 3'  sequence
ggcctgatcgaacctagagcgtggcgtggattgactagtacatgaccacttga

SEQ ID NO: 42562 - DNA, 53 bp, Artificial Sequence
  Description of Artificial Sequence: Synthetic gluten; inner sequence and 3'  sequence
cgaaacgccgtaaaagagctcatgtgggttttgactagtacatgaccacttga

SEQ ID NO: 42563 - DNA, 53 bp, Artificial Sequence
  Description of Artificial Sequence: Synthetic gluten; inner sequence and 3'  sequence
gaacgcatgtcgtccctacacgtgatcatgttgactagtacatgaccacttga

SEQ ID NO: 42564 - DNA, 53 bp, Artificial Sequence
  Description of Artificial Sequence: Synthetic gluten; inner sequence and 3'  sequence
ggacaacgatgaacggaagggcgtcgggtattgactagtacatgaccacttga

SEQ ID NO: 42565 - DNA, 53 bp, Artificial Sequence; identical to SEQ ID NO: 2479
  Description of Artificial Sequence: Synthetic gluten; inner sequence and 3'  sequence

SEQ ID NO: 42566 - DNA, 53 bp, Artificial Sequence
  Description of Artificial Sequence: Synthetic gluten; inner sequence and 3'  sequence
tcggcacgaaactttagagccctaacggtgttgactagtacatgaccacttga

SEQ ID NO: 42567 - DNA, 53 bp, Artificial Sequence
  Description of Artificial Sequence: Synthetic gluten; inner sequence and 3'  sequence
ggccgatcgaccgaaagaacgaacgacgtgttgactagtacatgaccacttga

SEQ ID NO: 42568 - DNA, 53 bp, Artificial Sequence
  Description of Artificial Sequence: Synthetic gluten; inner sequence and 3'  sequence
tggccgatcgaccctatcaagcgcagcatgttgactagtacatgaccacttga

SEQ ID NO: 42569 - DNA, 52 bp, Artificial Sequence
  Description of Artificial Sequence: Synthetic gluten; inner sequence and 3'  sequence
gacgacgcgaacctatcaagttgcatggattgactagtacatgaccacttga

SEQ ID NO: 42570 - DNA, 53 bp, Artificial Sequence; identical to SEQ ID NO: 2827
  Description of Artificial Sequence: Synthetic gluten; inner sequence and 3'  sequence

SEQ ID NO: 42571 - DNA, 53 bp, Artificial Sequence; identical to SEQ ID NO: 2136
  Description of Artificial Sequence: Synthetic gluten; inner sequence and 3'  sequence

SEQ ID NO: 42572 - DNA, 53 bp, Artificial Sequence
  Description of Artificial Sequence: Synthetic gluten; inner sequence and 3'  sequence
ggacagaacggacctatcatgtgacaggtattgactagtacatgaccacttga

SEQ ID NO: 42573 - DNA, 53 bp, Artificial Sequence
  Description of Artificial Sequence: Synthetic gluten; inner sequence and 3'  sequence
atggccggatcggaccgtgagtgctagtcattgactagtacatgaccacttga

SEQ ID NO: 42574 - DNA, 53 bp, Artificial Sequence
  Description of Artificial Sequence: Synthetic gluten; inner sequence and 3'  sequence
cctaaacgcacccttcaagttggcatcgtattgactagtacatgaccacttga

SEQ ID NO: 42575 - DNA, 53 bp, Artificial Sequence
  Description of Artificial Sequence: Synthetic gluten; inner sequence and 3'  sequence
ggcctgatcgaacctagagagtggcgttgattgactagtacatgaccacttga

SEQ ID NO: 42576 - DNA, 53 bp, Artificial Sequence
  Description of Artificial Sequence: Synthetic gluten; inner sequence and 3'  sequence
actcgtatggccgattgacctcaatgggcattgactagtacatgaccacttga

SEQ ID NO: 42577 - DNA, 53 bp, Artificial Sequence
  Description of Artificial Sequence: Synthetic gluten; inner sequence and 3'  sequence
gcactgcgatgacctaagatctaggcagcattgactagtacatgaccacttga

SEQ ID NO: 42578 - DNA, 53 bp, Artificial Sequence; identical to SEQ ID NO: 14744
  Description of Artificial Sequence: Synthetic gluten; inner sequence and 3'  sequence

SEQ ID NO: 42579 - DNA, 53 bp, Artificial Sequence
  Description of Artificial Sequence: Synthetic gluten; inner sequence and 3'  sequence
gccttccgaacccttcatgtgatcgtggacttgactagtacatgaccacttga

SEQ ID NO: 42580 - DNA, 53 bp, Artificial Sequence
  Description of Artificial Sequence: Synthetic gluten; inner sequence and 3'  sequence
caattggcctgaacgaaccttggtgcggctttgactagtacatgaccacttga

SEQ ID NO: 42581 - DNA, 53 bp, Artificial Sequence
  Description of Artificial Sequence: Synthetic gluten; inner sequence and 3'  sequence
gaccgcacgatgaccatttcaacgtggccattgactagtacatgaccacttga

SEQ ID NO: 42582 - DNA, 53 bp, Artificial Sequence
  Description of Artificial Sequence: Synthetic gluten; inner sequence and 3'  sequence
ggcctaacgtaccttcaagtcaggagtgtattgactagtacatgaccacttga

SEQ ID NO: 42583 - DNA, 48 bp, Artificial Sequence
  Description of Artificial Sequence: Synthetic gluten; inner sequence and 3'  sequence
cgtaccggcatgctctaggcaaccattgactagtacatgaccacttga

SEQ ID NO: 42584 - DNA, 53 bp, Artificial Sequence
  Description of Artificial Sequence: Synthetic gluten; inner sequence and 3'  sequence
acggtcacgaccacttgccaaatgttagctttgactagtacatgaccacttga

SEQ ID NO: 42585 - DNA, 53 bp, Artificial Sequence
  Description of Artificial Sequence: Synthetic gluten; inner sequence and 3'  sequence
tgcccaaacgaaccttagagcatggccgtattgactagtacatgaccacttga

SEQ ID NO: 42586 - DNA, 53 bp, Artificial Sequence; identical to SEQ ID NO: 38677
  Description of Artificial Sequence: Synthetic gluten; inner sequence and 3'  sequence

SEQ ID NO: 42587 - DNA, 53 bp, Artificial Sequence
  Description of Artificial Sequence: Synthetic gluten; inner sequence and 3'  sequence
tcagtccgacctgaactatctgggcacgcattgactagtacatgaccacttga

SEQ ID NO: 42588 - DNA, 53 bp, Artificial Sequence
  Description of Artificial Sequence: Synthetic gluten; inner sequence and 3'  sequence
catgtacgaacgcgacattcatgttcattattgactagtacatgaccacttga

SEQ ID NO: 42589 - DNA, 53 bp, Artificial Sequence
  Description of Artificial Sequence: Synthetic gluten; inner sequence and 3'  sequence
tggcccgagcgaaccgatcacagtgaggcattgactagtacatgaccacttga

SEQ ID NO: 42590 - DNA, 53 bp, Artificial Sequence
  Description of Artificial Sequence: Synthetic gluten; inner sequence and 3'  sequence
taacatgtcacagtgggccttgctcgaaccttgactagtacatgaccacttga

SEQ ID NO: 42591 - DNA, 53 bp, Artificial Sequence
  Description of Artificial Sequence: Synthetic gluten; inner sequence and 3'  sequence
ggccagagcgtaccttcatgtataggcaaattgactagtacatgaccacttga

SEQ ID NO: 42592 - DNA, 51 bp, Artificial Sequence
  Description of Artificial Sequence: Synthetic gluten; inner sequence and 3'  sequence
ggccgacacccctatcaagctggacatgttgactagtacatgaccacttga

SEQ ID NO: 42593 - DNA, 53 bp, Artificial Sequence
  Description of Artificial Sequence: Synthetic gluten; inner sequence and 3'  sequence
ggccgaatcggaactagcaagcggtatgtattgactagtacatgaccacttga

SEQ ID NO: 42594 - DNA, 53 bp, Artificial Sequence
  Description of Artificial Sequence: Synthetic gluten; inner sequence and 3'  sequence
ggcctgcgatgaccgctcaagtgccaggcattgactagtacatgaccacttga

SEQ ID NO: 42595 - DNA, 53 bp, Artificial Sequence; identical to SEQ ID NO: 38642
  Description of Artificial Sequence: Synthetic gluten; inner sequence and 3'  sequence

SEQ ID NO: 42596 - DNA, 53 bp, Artificial Sequence
  Description of Artificial Sequence: Synthetic gluten; inner sequence and 3'  sequence
ggcctgcgatggatgaggcgctgcactagtttgactagtacatgaccacttga

SEQ ID NO: 42597 - DNA, 53 bp, Artificial Sequence
  Description of Artificial Sequence: Synthetic gluten; inner sequence and 3'  sequence
actgatcgaaccgtcgaagtcagtttcacattgactagtacatgaccacttga

SEQ ID NO: 42598 - DNA, 53 bp, Artificial Sequence
  Description of Artificial Sequence: Synthetic gluten; inner sequence and 3'  sequence
ggacggagcgaaccaagtacaggcagcttattgactagtacatgaccacttga

SEQ ID NO: 42599 - DNA, 53 bp, Artificial Sequence
  Description of Artificial Sequence: Synthetic gluten; inner sequence and 3'  sequence
catgtctaacagaaggccactcggctcatattgactagtacatgaccacttga

SEQ ID NO: 42600 - DNA, 53 bp, Artificial Sequence; identical to SEQ ID NO: 30928
  Description of Artificial Sequence: Synthetic gluten; inner sequence and 3'  sequence

SEQ ID NO: 42601 - DNA, 53 bp, Artificial Sequence
  Description of Artificial Sequence: Synthetic gluten; inner sequence and 3'  sequence
ccgagacaagctacatcagacaattgctaattgactagtacatgaccacttga

SEQ ID NO: 42602 - DNA, 53 bp, Artificial Sequence
  Description of Artificial Sequence: Synthetic gluten; inner sequence and 3'  sequence
gtactgatcggaacatggcgactgtcaacgttgactagtacatgaccacttga

SEQ ID NO: 42603 - DNA, 53 bp, Artificial Sequence
  Description of Artificial Sequence: Synthetic gluten; inner sequence and 3'  sequence
ggccgacgcgcactgttcatgcactacgtcttgactagtacatgaccacttga

SEQ ID NO: 42604 - DNA, 53 bp, Artificial Sequence
  Description of Artificial Sequence: Synthetic gluten; inner sequence and 3'  sequence
catgcactggaacgagtgggaaccagcatattgactagtacatgaccacttga

SEQ ID NO: 42605 - DNA, 53 bp, Artificial Sequence
  Description of Artificial Sequence: Synthetic gluten; inner sequence and 3'  sequence
cgtaccgcaagtgacgtgtccgcgccgtgattgactagtacatgaccacttga

SEQ ID NO: 42606 - DNA, 53 bp, Artificial Sequence
  Description of Artificial Sequence: Synthetic gluten; inner sequence and 3'  sequence
tggaggacgcagtaaataacgagctcgtggttgactagtacatgaccacttga

SEQ ID NO: 42607 - DNA, 53 bp, Artificial Sequence
  Description of Artificial Sequence: Synthetic gluten; inner sequence and 3'  sequence
ggccgaagcgaacactagtcagagcatgtattgactagtacatgaccacttga

SEQ ID NO: 42608 - DNA, 53 bp, Artificial Sequence
  Description of Artificial Sequence: Synthetic gluten; inner sequence and 3'  sequence
ggacctgagctgcacgatcaaggcggaatgttgactagtacatgaccacttga

SEQ ID NO: 42609 - DNA, 53 bp, Artificial Sequence
  Description of Artificial Sequence: Synthetic gluten; inner sequence and 3'  sequence
gatgtcctgcgatgacctaaagcgtacgtgttgactagtacatgaccacttga

SEQ ID NO: 42610 - DNA, 53 bp, Artificial Sequence; identical to SEQ ID NO: 6407
  Description of Artificial Sequence: Synthetic gluten; inner sequence and 3'  sequence

SEQ ID NO: 42611 - DNA, 53 bp, Artificial Sequence
  Description of Artificial Sequence: Synthetic gluten; inner sequence and 3'  sequence
catgtgctaattcggacggacaagttcatattgactagtacatgaccacttga

SEQ ID NO: 42612 - DNA, 53 bp, Artificial Sequence
  Description of Artificial Sequence: Synthetic gluten; inner sequence and 3'  sequence
tgacatgtgaccgactggcttagctgggcattgactagtacatgaccacttga

SEQ ID NO: 42613 - DNA, 53 bp, Artificial Sequence
  Description of Artificial Sequence: Synthetic gluten; inner sequence and 3'  sequence
ggccgacgagaccctgcaattggccatggattgactagtacatgaccacttga

SEQ ID NO: 42614 - DNA, 53 bp, Artificial Sequence
  Description of Artificial Sequence: Synthetic gluten; inner sequence and 3'  sequence
gtactgcgcgacctcaacgtgcgtgatgtattgactagtacatgaccacttga

SEQ ID NO: 42615 - DNA, 53 bp, Artificial Sequence
  Description of Artificial Sequence: Synthetic gluten; inner sequence and 3'  sequence
ccgaacggcgtgtaatgggcaaacttcagattgactagtacatgaccacttga

SEQ ID NO: 42616 - DNA, 53 bp, Artificial Sequence
  Description of Artificial Sequence: Synthetic gluten; inner sequence and 3'  sequence
ggacgcaacgaacctaagagtggccagggattgactagtacatgaccacttga

SEQ ID NO: 42617 - DNA, 53 bp, Artificial Sequence
  Description of Artificial Sequence: Synthetic gluten; inner sequence and 3'  sequence
ggcctgcgatggatggggcaatacgacgttttgactagtacatgaccacttga

SEQ ID NO: 42618 - DNA, 53 bp, Artificial Sequence
  Description of Artificial Sequence: Synthetic gluten; inner sequence and 3'  sequence
gacattcgagtcaccagtcatgcacgacgattgactagtacatgaccacttga

SEQ ID NO: 42619 - DNA, 53 bp, Artificial Sequence
  Description of Artificial Sequence: Synthetic gluten; inner sequence and 3'  sequence
ggcccgaacgaccgttgaagagcatgcactttgactagtacatgaccacttga

SEQ ID NO: 42620 - DNA, 53 bp, Artificial Sequence
  Description of Artificial Sequence: Synthetic gluten; inner sequence and 3'  sequence
tcatcagatggacgccgaatgggtgtgggcttgactagtacatgaccacttga

SEQ ID NO: 42621 - DNA, 53 bp, Artificial Sequence
  Description of Artificial Sequence: Synthetic gluten; inner sequence and 3'  sequence
ggacgcgatggatgtggaaaggtctagtcattgactagtacatgaccacttga

SEQ ID NO: 42622 - DNA, 53 bp, Artificial Sequence
  Description of Artificial Sequence: Synthetic gluten; inner sequence and 3'  sequence
atggacgcagcgtaccttcaagtgctcgtgttgactagtacatgaccacttga

SEQ ID NO: 42623 - DNA, 53 bp, Artificial Sequence
  Description of Artificial Sequence: Synthetic gluten; inner sequence and 3'  sequence
tggcatgcgatggttccgagaaagtgcgaattgactagtacatgaccacttga

SEQ ID NO: 42624 - DNA, 53 bp, Artificial Sequence
  Description of Artificial Sequence: Synthetic gluten; inner sequence and 3'  sequence
ggactgcgacttcacagatcaggcaatgcattgactagtacatgaccacttga

SEQ ID NO: 42625 - DNA, 53 bp, Artificial Sequence
  Description of Artificial Sequence: Synthetic gluten; inner sequence and 3'  sequence
ggcattcgatgcactacaaggtgttgtgtattgactagtacatgaccacttga

SEQ ID NO: 42626 - DNA, 53 bp, Artificial Sequence
  Description of Artificial Sequence: Synthetic gluten; inner sequence and 3'  sequence
catggctaaacagcagcgtaattcgtcatattgactagtacatgaccacttga

SEQ ID NO: 42627 - DNA, 53 bp, Artificial Sequence
  Description of Artificial Sequence: Synthetic gluten; inner sequence and 3'  sequence
tcacagatggcgtgatctgaaccggtggcattgactagtacatgaccacttga

SEQ ID NO: 42628 - DNA, 53 bp, Artificial Sequence
  Description of Artificial Sequence: Synthetic gluten; inner sequence and 3'  sequence
ggccgagctggatgtgagcatgcatctagtttgactagtacatgaccacttga

SEQ ID NO: 42629 - DNA, 53 bp, Artificial Sequence
  Description of Artificial Sequence: Synthetic gluten; inner sequence and 3'  sequence
ccgatcagccctatcaagcatgcactgtctttgactagtacatgaccacttga

SEQ ID NO: 42630 - DNA, 53 bp, Artificial Sequence
  Description of Artificial Sequence: Synthetic gluten; inner sequence and 3'  sequence
tcgaatatgtacgaagatgcccattcagtgttgactagtacatgaccacttga

SEQ ID NO: 42631 - DNA, 53 bp, Artificial Sequence
  Description of Artificial Sequence: Synthetic gluten; inner sequence and 3'  sequence
ctcattagtggccgagaccgcaattccatcttgactagtacatgaccacttga

SEQ ID NO: 42632 - DNA, 53 bp, Artificial Sequence; identical to SEQ ID NO: 38961
  Description of Artificial Sequence: Synthetic gluten; inner sequence and 3'  sequence

SEQ ID NO: 42633 - DNA, 53 bp, Artificial Sequence
  Description of Artificial Sequence: Synthetic gluten; inner sequence and 3'  sequence
ccagcatctcataagtggccttacctgcctttgactagtacatgaccacttga

SEQ ID NO: 42634 - DNA, 53 bp, Artificial Sequence
  Description of Artificial Sequence: Synthetic gluten; inner sequence and 3'  sequence
gtcctgatcgccctagcaagcggccatggattgactagtacatgaccacttga

SEQ ID NO: 42635 - DNA, 53 bp, Artificial Sequence
  Description of Artificial Sequence: Synthetic gluten; inner sequence and 3'  sequence
cctgacacgataaagatagagcttgcacgattgactagtacatgaccacttga

SEQ ID NO: 42636 - DNA, 53 bp, Artificial Sequence
  Description of Artificial Sequence: Synthetic gluten; inner sequence and 3'  sequence
cctgctggagcctgagccgaagatcagtcattgactagtacatgaccacttga

SEQ ID NO: 42637 - DNA, 53 bp, Artificial Sequence
  Description of Artificial Sequence: Synthetic gluten; inner sequence and 3'  sequence
tcaagatggccgaacgaaacatggcagtcattgactagtacatgaccacttga

SEQ ID NO: 42638 - DNA, 53 bp, Artificial Sequence
  Description of Artificial Sequence: Synthetic gluten; inner sequence and 3'  sequence
cacaacgcaagtcttcctttatgtcatctattgactagtacatgaccacttga

SEQ ID NO: 42639 - DNA, 53 bp, Artificial Sequence
  Description of Artificial Sequence: Synthetic gluten; inner sequence and 3'  sequence
ccatcatagggttggtgccactgatgtatattgactagtacatgaccacttga

SEQ ID NO: 42640 - DNA, 53 bp, Artificial Sequence
  Description of Artificial Sequence: Synthetic gluten; inner sequence and 3'  sequence
catgacgatcacagcgaggtttacgtcatattgactagtacatgaccacttga

SEQ ID NO: 42641 - DNA, 48 bp, Artificial Sequence
  Description of Artificial Sequence: Synthetic gluten; inner sequence and 3'  sequence
ccgagctgacctatcaacgcggtcattgactagtacatgaccacttga

SEQ ID NO: 42642 - DNA, 53 bp, Artificial Sequence
  Description of Artificial Sequence: Synthetic gluten; inner sequence and 3'  sequence
agtcacgccctaacgttgcctatgctagcattgactagtacatgaccacttga

SEQ ID NO: 42643 - DNA, 53 bp, Artificial Sequence
  Description of Artificial Sequence: Synthetic gluten; inner sequence and 3'  sequence
ccgatcgaaaccggagagcatgcacggagcttgactagtacatgaccacttga

SEQ ID NO: 42644 - DNA, 53 bp, Artificial Sequence
  Description of Artificial Sequence: Synthetic gluten; inner sequence and 3'  sequence
atgtactgtatccacggtcatagagcatcattgactagtacatgaccacttga

SEQ ID NO: 42645 - DNA, 53 bp, Artificial Sequence
  Description of Artificial Sequence: Synthetic gluten; inner sequence and 3'  sequence
cgtaccgcaagtgacgcgtccgtgccgtgattgactagtacatgaccacttga

SEQ ID NO: 42646 - DNA, 50 bp, Artificial Sequence
  Description of Artificial Sequence: Synthetic gluten; inner sequence and 3'  sequence
cctgagcgcacctgggcatcactgtcattgactagtacatgaccacttga

SEQ ID NO: 42647 - DNA, 53 bp, Artificial Sequence
  Description of Artificial Sequence: Synthetic gluten; inner sequence and 3'  sequence
tatggactgagcggaactgcactatgcatgttgactagtacatgaccacttga

SEQ ID NO: 42648 - DNA, 53 bp, Artificial Sequence; identical to SEQ ID NO: 2791
  Description of Artificial Sequence: Synthetic gluten; inner sequence and 3'  sequence

SEQ ID NO: 42649 - DNA, 53 bp, Artificial Sequence
  Description of Artificial Sequence: Synthetic gluten; inner sequence and 3'  sequence
aatgtggactgagcggaacttaagatagtattgactagtacatgaccacttga

SEQ ID NO: 42650 - DNA, 53 bp, Artificial Sequence
  Description of Artificial Sequence: Synthetic gluten; inner sequence and 3'  sequence
tcttcgcggaacgatttagacgcgtcaactttgactagtacatgaccacttga

SEQ ID NO: 42651 - DNA, 53 bp, Artificial Sequence; identical to SEQ ID NO: 2926
  Description of Artificial Sequence: Synthetic gluten; inner sequence and 3'  sequence

SEQ ID NO: 42652 - DNA, 53 bp, Artificial Sequence
  Description of Artificial Sequence: Synthetic gluten; inner sequence and 3'  sequence
ggactgaacgagcctagtcttagcgtgtctttgactagtacatgaccacttga

SEQ ID NO: 42653 - DNA, 53 bp, Artificial Sequence; identical to SEQ ID NO: 2063
  Description of Artificial Sequence: Synthetic gluten; inner sequence and 3'  sequence

SEQ ID NO: 42654 - DNA, 53 bp, Artificial Sequence
  Description of Artificial Sequence: Synthetic gluten; inner sequence and 3'  sequence
cctgaacgcgtcctaatgagtcattacgaattgactagtacatgaccacttga

SEQ ID NO: 42655 - DNA, 53 bp, Artificial Sequence
  Description of Artificial Sequence: Synthetic gluten; inner sequence and 3'  sequence
ccgagcggaaatggaataggcaaaccagctttgactagtacatgaccacttga

SEQ ID NO: 42656 - DNA, 53 bp, Artificial Sequence
  Description of Artificial Sequence: Synthetic gluten; inner sequence and 3'  sequence
ccgagcgacattacaaggcaaaactttggtttgactagtacatgaccacttga

SEQ ID NO: 42657 - DNA, 53 bp, Artificial Sequence
  Description of Artificial Sequence: Synthetic gluten; inner sequence and 3'  sequence
cgaaacgcggtgcagtaagatgtgcttcgcttgactagtacatgaccacttga

SEQ ID NO: 42658 - DNA, 53 bp, Artificial Sequence
  Description of Artificial Sequence: Synthetic gluten; inner sequence and 3'  sequence
gtcatgcgcggaccttcaagtaggcgtgtattgactagtacatgaccacttga

SEQ ID NO: 42659 - DNA, 53 bp, Artificial Sequence
  Description of Artificial Sequence: Synthetic gluten; inner sequence and 3'  sequence
aatgtgtcatgatcgcaccctcaagttggcttgactagtacatgaccacttga

SEQ ID NO: 42660 - DNA, 53 bp, Artificial Sequence
  Description of Artificial Sequence: Synthetic gluten; inner sequence and 3'  sequence
cggtccagataccagacgggctaggcacaattgactagtacatgaccacttga

SEQ ID NO: 42661 - DNA, 53 bp, Artificial Sequence
  Description of Artificial Sequence: Synthetic gluten; inner sequence and 3'  sequence
cttacctagcacgtggacaggtaggcggacttgactagtacatgaccacttga

SEQ ID NO: 42662 - DNA, 53 bp, Artificial Sequence
  Description of Artificial Sequence: Synthetic gluten; inner sequence and 3'  sequence
cctgcgcgaaccgttagaactagtactggcttgactagtacatgaccacttga

SEQ ID NO: 42663 - DNA, 53 bp, Artificial Sequence
  Description of Artificial Sequence: Synthetic gluten; inner sequence and 3'  sequence
ggcctgatcgaacctagagagtggcgaggattgactagtacatgaccacttga

SEQ ID NO: 42664 - DNA, 53 bp, Artificial Sequence
  Description of Artificial Sequence: Synthetic gluten; inner sequence and 3'  sequence
ctcatcacatggccgaccgtagatggacgattgactagtacatgaccacttga

SEQ ID NO: 42665 - DNA, 53 bp, Artificial Sequence
  Description of Artificial Sequence: Synthetic gluten; inner sequence and 3'  sequence
catgtacacaccaaagttagcttgctcatattgactagtacatgaccacttga

SEQ ID NO: 42666 - DNA, 53 bp, Artificial Sequence
  Description of Artificial Sequence: Synthetic gluten; inner sequence and 3'  sequence
tggcatgaacgaacctattcaaacggtctattgactagtacatgaccacttga

SEQ ID NO: 42667 - DNA, 53 bp, Artificial Sequence
  Description of Artificial Sequence: Synthetic gluten; inner sequence and 3'  sequence
gtgctcgaaacccgtaagtggcatggcgtattgactagtacatgaccacttga

SEQ ID NO: 42668 - DNA, 53 bp, Artificial Sequence
  Description of Artificial Sequence: Synthetic gluten; inner sequence and 3'  sequence
catgcccaacgggatgtacgcctagtccaattgactagtacatgaccacttga

SEQ ID NO: 42669 - DNA, 53 bp, Artificial Sequence; identical to SEQ ID NO: 2943
  Description of Artificial Sequence: Synthetic gluten; inner sequence and 3'  sequence

SEQ ID NO: 42670 - DNA, 53 bp, Artificial Sequence
  Description of Artificial Sequence: Synthetic gluten; inner sequence and 3'  sequence
cgacagagccgaagaacgagtgttaacgcattgactagtacatgaccacttga

SEQ ID NO: 42671 - DNA, 53 bp, Artificial Sequence
  Description of Artificial Sequence: Synthetic gluten; inner sequence and 3'  sequence
gtcatgcgataccctaacgagctaggcatattgactagtacatgaccacttga

SEQ ID NO: 42672 - DNA, 53 bp, Artificial Sequence; identical to SEQ ID NO: 6348
  Description of Artificial Sequence: Synthetic gluten; inner sequence and 3'  sequence

SEQ ID NO: 42673 - DNA, 53 bp, Artificial Sequence
  Description of Artificial Sequence: Synthetic gluten; inner sequence and 3'  sequence
ggactgaacgacccctagatatggacgagattgactagtacatgaccacttga

SEQ ID NO: 42674 - DNA, 53 bp, Artificial Sequence
  Description of Artificial Sequence: Synthetic gluten; inner sequence and 3'  sequence
gccacatcgtccctagcaagcaggcttgtattgactagtacatgaccacttga

SEQ ID NO: 42675 - DNA, 53 bp, Artificial Sequence
  Description of Artificial Sequence: Synthetic gluten; inner sequence and 3'  sequence
tgagatggcctgatcggaaagtacgacgtattgactagtacatgaccacttga

SEQ ID NO: 42676 - DNA, 53 bp, Artificial Sequence
  Description of Artificial Sequence: Synthetic gluten; inner sequence and 3'  sequence
ccgacgatgaaccaaccatgctactttggcttgactagtacatgaccacttga

SEQ ID NO: 42677 - DNA, 53 bp, Artificial Sequence
  Description of Artificial Sequence: Synthetic gluten; inner sequence and 3'  sequence
cacaacgtgcgaaataggactgatcgagccttgactagtacatgaccacttga

SEQ ID NO: 42678 - DNA, 53 bp, Artificial Sequence
  Description of Artificial Sequence: Synthetic gluten; inner sequence and 3'  sequence
catgacggacagcagctcttagtaggcatattgactagtacatgaccacttga

SEQ ID NO: 42679 - DNA, 53 bp, Artificial Sequence
  Description of Artificial Sequence: Synthetic gluten; inner sequence and 3'  sequence
ggactgaacgaaccggtaagaacatgggaattgactagtacatgaccacttga

SEQ ID NO: 42680 - DNA, 53 bp, Artificial Sequence
  Description of Artificial Sequence: Synthetic gluten; inner sequence and 3'  sequence
catgtacccaacactagccaccggggcatattgactagtacatgaccacttga

SEQ ID NO: 42681 - DNA, 53 bp, Artificial Sequence
  Description of Artificial Sequence: Synthetic gluten; inner sequence and 3'  sequence
gtgcggaacgagcccttcgagtgccatggattgactagtacatgaccacttga

SEQ ID NO: 42682 - DNA, 53 bp, Artificial Sequence
  Description of Artificial Sequence: Synthetic gluten; inner sequence and 3'  sequence
tacacattggccgacgattcactaaggacattgactagtacatgaccacttga

SEQ ID NO: 42683 - DNA, 48 bp, Artificial Sequence
  Description of Artificial Sequence: Synthetic gluten; inner sequence and 3'  sequence
ggcatgcgatggatgtgtgcatgtattgactagtacatgaccacttga

SEQ ID NO: 42684 - DNA, 53 bp, Artificial Sequence
  Description of Artificial Sequence: Synthetic gluten; inner sequence and 3'  sequence
ccgatcgacacctgggactgatctgacatattgactagtacatgaccacttga

SEQ ID NO: 42685 - DNA, 53 bp, Artificial Sequence; identical to SEQ ID NO: 2406
  Description of Artificial Sequence: Synthetic gluten; inner sequence and 3'  sequence

SEQ ID NO: 42686 - DNA, 53 bp, Artificial Sequence
  Description of Artificial Sequence: Synthetic gluten; inner sequence and 3'  sequence
catgtgacggaaaagagcggtatcgtcatattgactagtacatgaccacttga

SEQ ID NO: 42687 - DNA, 54 bp, Artificial Sequence
  Description of Artificial Sequence: Synthetic gluten; inner sequence and 3'  sequence
acacatggcatgagcgatccttcaggtgggattgactagtacatgaccacttga

SEQ ID NO: 42688 - DNA, 53 bp, Artificial Sequence
  Description of Artificial Sequence: Synthetic gluten; inner sequence and 3'  sequence
cgaacgcaagctcgagacaatggcattcgattgactagtacatgaccacttga

SEQ ID NO: 42689 - DNA, 53 bp, Artificial Sequence; identical to SEQ ID NO: 2478
  Description of Artificial Sequence: Synthetic gluten; inner sequence and 3'  sequence

SEQ ID NO: 42690 - DNA, 53 bp, Artificial Sequence; identical to SEQ ID NO: 2092
  Description of Artificial Sequence: Synthetic gluten; inner sequence and 3'  sequence

SEQ ID NO: 42691 - DNA, 53 bp, Artificial Sequence
  Description of Artificial Sequence: Synthetic gluten; inner sequence and 3'  sequence
aatgtgcccgctgattcccttcgagtgtcattgactagtacatgaccacttga

SEQ ID NO: 42692 - DNA, 53 bp, Artificial Sequence
  Description of Artificial Sequence: Synthetic gluten; inner sequence and 3'  sequence
acattggacggaacgacccttcaagcgtgcttgactagtacatgaccacttga

SEQ ID NO: 42693 - DNA, 53 bp, Artificial Sequence; identical to SEQ ID NO: 14872
  Description of Artificial Sequence: Synthetic gluten; inner sequence and 3'  sequence

SEQ ID NO: 42694 - DNA, 53 bp, Artificial Sequence
  Description of Artificial Sequence: Synthetic gluten; inner sequence and 3'  sequence
gtgcgaacacgagcctatcaaggaggcatgttgactagtacatgaccacttga

SEQ ID NO: 42695 - DNA, 53 bp, Artificial Sequence
  Description of Artificial Sequence: Synthetic gluten; inner sequence and 3'  sequence
gtacgatcgcaccctaggcatgtcgacgctttgactagtacatgaccacttga

SEQ ID NO: 42696 - DNA, 53 bp, Artificial Sequence
  Description of Artificial Sequence: Synthetic gluten; inner sequence and 3'  sequence
acgatcgcaccatcaagtcggccttggacattgactagtacatgaccacttga

SEQ ID NO: 42697 - DNA, 53 bp, Artificial Sequence
  Description of Artificial Sequence: Synthetic gluten; inner sequence and 3'  sequence
ggccgagcttcccgagtcaaatgctaggcgttgactagtacatgaccacttga

SEQ ID NO: 42698 - DNA, 53 bp, Artificial Sequence
  Description of Artificial Sequence: Synthetic gluten; inner sequence and 3'  sequence
cgtgtacgaatctagcaccgcgttggcatattgactagtacatgaccacttga

SEQ ID NO: 42699 - DNA, 53 bp, Artificial Sequence; identical to SEQ ID NO: 6881
  Description of Artificial Sequence: Synthetic gluten; inner sequence and 3'  sequence

SEQ ID NO: 42700 - DNA, 53 bp, Artificial Sequence
  Description of Artificial Sequence: Synthetic gluten; inner sequence and 3'  sequence
ggccgacctggatgcgagcatgcatctagtttgactagtacatgaccacttga

SEQ ID NO: 42701 - DNA, 53 bp, Artificial Sequence
  Description of Artificial Sequence: Synthetic gluten; inner sequence and 3'  sequence
ggacggatcgaacctacaaggtgtcgtggattgactagtacatgaccacttga

SEQ ID NO: 42702 - DNA, 53 bp, Artificial Sequence
  Description of Artificial Sequence: Synthetic gluten; inner sequence and 3'  sequence
ggcattcgatgcactacaagatgttgtgtattgactagtacatgaccacttga

SEQ ID NO: 42703 - DNA, 53 bp, Artificial Sequence
  Description of Artificial Sequence: Synthetic gluten; inner sequence and 3'  sequence
ggcattcgatgcaccttcgtcagtctgtcattgactagtacatgaccacttga

SEQ ID NO: 42704 - DNA, 53 bp, Artificial Sequence
  Description of Artificial Sequence: Synthetic gluten; inner sequence and 3'  sequence
gagaacgcaggacaaatctatgggctgatcttgactagtacatgaccacttga

SEQ ID NO: 42705 - DNA, 53 bp, Artificial Sequence
  Description of Artificial Sequence: Synthetic gluten; inner sequence and 3'  sequence
ccgactcggaactagggaattggcgcagtcttgactagtacatgaccacttga

SEQ ID NO: 42706 - DNA, 53 bp, Artificial Sequence; identical to SEQ ID NO: 30406
  Description of Artificial Sequence: Synthetic gluten; inner sequence and 3'  sequence

SEQ ID NO: 42707 - DNA, 53 bp, Artificial Sequence
  Description of Artificial Sequence: Synthetic gluten; inner sequence and 3'  sequence
caacaggaactgctggcctttatgtcactattgactagtacatgaccacttga

SEQ ID NO: 42708 - DNA, 53 bp, Artificial Sequence; identical to SEQ ID NO: 34332
  Description of Artificial Sequence: Synthetic gluten; inner sequence and 3'  sequence

SEQ ID NO: 42709 - DNA, 53 bp, Artificial Sequence; identical to SEQ ID NO: 2026
  Description of Artificial Sequence: Synthetic gluten; inner sequence and 3'  sequence

SEQ ID NO: 42710 - DNA, 54 bp, Artificial Sequence
  Description of Artificial Sequence: Synthetic gluten; inner sequence and 3'  sequence
gtccgactcggcccgaagaacttgtcacagcttgactagtacatgaccacttga

SEQ ID NO: 42711 - DNA, 53 bp, Artificial Sequence
  Description of Artificial Sequence: Synthetic gluten; inner sequence and 3'  sequence
ccgacgacgccctgaaaggcaggcacgtacttgactagtacatgaccacttga

SEQ ID NO: 42712 - DNA, 53 bp, Artificial Sequence; identical to SEQ ID NO: 30600
  Description of Artificial Sequence: Synthetic gluten; inner sequence and 3'  sequence

SEQ ID NO: 42713 - DNA, 53 bp, Artificial Sequence
  Description of Artificial Sequence: Synthetic gluten; inner sequence and 3'  sequence
tgttcacaaccctactggtcactcgcttcattgactagtacatgaccacttga

SEQ ID NO: 42714 - DNA, 53 bp, Artificial Sequence; identical to SEQ ID NO: 2237
  Description of Artificial Sequence: Synthetic gluten; inner sequence and 3'  sequence

SEQ ID NO: 42715 - DNA, 53 bp, Artificial Sequence
  Description of Artificial Sequence: Synthetic gluten; inner sequence and 3'  sequence
ggcctgaacttcccgtagtacgtgtcatttttgactagtacatgaccacttga

SEQ ID NO: 42716 - DNA, 53 bp, Artificial Sequence; identical to SEQ ID NO: 38179
  Description of Artificial Sequence: Synthetic gluten; inner sequence and 3'  sequence

SEQ ID NO: 42717 - DNA, 53 bp, Artificial Sequence
  Description of Artificial Sequence: Synthetic gluten; inner sequence and 3'  sequence
gtacttcgactgcctatcaagtcgcatgtattgactagtacatgaccacttga

SEQ ID NO: 42718 - DNA, 53 bp, Artificial Sequence
  Description of Artificial Sequence: Synthetic gluten; inner sequence and 3'  sequence
acgagccggagagaatggcaaagcgtgctattgactagtacatgaccacttga

SEQ ID NO: 42719 - DNA, 53 bp, Artificial Sequence
  Description of Artificial Sequence: Synthetic gluten; inner sequence and 3'  sequence
gacgcacgcctccctagggacatgcacgtattgactagtacatgaccacttga

SEQ ID NO: 42720 - DNA, 53 bp, Artificial Sequence
  Description of Artificial Sequence: Synthetic gluten; inner sequence and 3'  sequence
ggacggatcgaacctacaagatgtcgtggattgactagtacatgaccacttga

SEQ ID NO: 42721 - DNA, 53 bp, Artificial Sequence
  Description of Artificial Sequence: Synthetic gluten; inner sequence and 3'  sequence
atcgattggcagaaagtcgtaacggcaatattgactagtacatgaccacttga

SEQ ID NO: 42722 - DNA, 53 bp, Artificial Sequence
  Description of Artificial Sequence: Synthetic gluten; inner sequence and 3'  sequence
cacagaacgcgacgaagttatgtctcacacttgactagtacatgaccacttga

SEQ ID NO: 42723 - DNA, 53 bp, Artificial Sequence
  Description of Artificial Sequence: Synthetic gluten; inner sequence and 3'  sequence
tggaccgagcgacctgtactcatcacagcgttgactagtacatgaccacttga

SEQ ID NO: 42724 - DNA, 53 bp, Artificial Sequence; identical to SEQ ID NO: 2131
  Description of Artificial Sequence: Synthetic gluten; inner sequence and 3'  sequence

SEQ ID NO: 42725 - DNA, 53 bp, Artificial Sequence
  Description of Artificial Sequence: Synthetic gluten; inner sequence and 3'  sequence
gtacgcacacgaccctcaagagtgcatggattgactagtacatgaccacttga

SEQ ID NO: 42726 - DNA, 53 bp, Artificial Sequence
  Description of Artificial Sequence: Synthetic gluten; inner sequence and 3'  sequence
ccgagcgcgacctaaagagagaagtactgcttgactagtacatgaccacttga

SEQ ID NO: 42727 - DNA, 53 bp, Artificial Sequence
  Description of Artificial Sequence: Synthetic gluten; inner sequence and 3'  sequence
actttcgctgaacgttgaatagagcgatcattgactagtacatgaccacttga

SEQ ID NO: 42728 - DNA, 53 bp, Artificial Sequence
  Description of Artificial Sequence: Synthetic gluten; inner sequence and 3'  sequence
gtacaatctggcctagcaagtgcgtatgtattgactagtacatgaccacttga

SEQ ID NO: 42729 - DNA, 53 bp, Artificial Sequence
  Description of Artificial Sequence: Synthetic gluten; inner sequence and 3'  sequence
agcgacagagccgaagagaaaggcaatttattgactagtacatgaccacttga

SEQ ID NO: 42730 - DNA, 53 bp, Artificial Sequence
  Description of Artificial Sequence: Synthetic gluten; inner sequence and 3'  sequence
ggccacgacatcagatgaacttgtctggatttgactagtacatgaccacttga

SEQ ID NO: 42731 - DNA, 53 bp, Artificial Sequence
  Description of Artificial Sequence: Synthetic gluten; inner sequence and 3'  sequence
tgaacaccgtcaaccataatggacgcgctcttgactagtacatgaccacttga

SEQ ID NO: 42732 - DNA, 52 bp, Artificial Sequence
  Description of Artificial Sequence: Synthetic gluten; inner sequence and 3'  sequence
tggcctgagcgaccatggactgacgtagtttgactagtacatgaccacttga

SEQ ID NO: 42733 - DNA, 53 bp, Artificial Sequence; identical to SEQ ID NO: 2213
  Description of Artificial Sequence: Synthetic gluten; inner sequence and 3'  sequence

SEQ ID NO: 42734 - DNA, 53 bp, Artificial Sequence
  Description of Artificial Sequence: Synthetic gluten; inner sequence and 3'  sequence
cgagactagagccgaagattcagtcagaatttgactagtacatgaccacttga

SEQ ID NO: 42735 - DNA, 53 bp, Artificial Sequence
  Description of Artificial Sequence: Synthetic gluten; inner sequence and 3'  sequence
atggccgccgctgaacatggattagtcatattgactagtacatgaccacttga

SEQ ID NO: 42736 - DNA, 53 bp, Artificial Sequence
  Description of Artificial Sequence: Synthetic gluten; inner sequence and 3'  sequence
ggccggaacgccactcaagtcgtgatgtgcttgactagtacatgaccacttga

SEQ ID NO: 42737 - DNA, 53 bp, Artificial Sequence
  Description of Artificial Sequence: Synthetic gluten; inner sequence and 3'  sequence
ctgaacgaccgagctgagaacatggatagattgactagtacatgaccacttga

SEQ ID NO: 42738 - DNA, 53 bp, Artificial Sequence
  Description of Artificial Sequence: Synthetic gluten; inner sequence and 3'  sequence
cctgagcgaaccctagtagtaggcactgtattgactagtacatgaccacttga

SEQ ID NO: 42739 - DNA, 53 bp, Artificial Sequence
  Description of Artificial Sequence: Synthetic gluten; inner sequence and 3'  sequence
ccgaagatggacgaaaggtgaggtacgatgttgactagtacatgaccacttga

SEQ ID NO: 42740 - DNA, 53 bp, Artificial Sequence
  Description of Artificial Sequence: Synthetic gluten; inner sequence and 3'  sequence
ggcatgcgaaacaagttcacacccgtcgctttgactagtacatgaccacttga

SEQ ID NO: 42741 - DNA, 53 bp, Artificial Sequence; identical to SEQ ID NO: 2118
  Description of Artificial Sequence: Synthetic gluten; inner sequence and 3'  sequence

SEQ ID NO: 42742 - DNA, 53 bp, Artificial Sequence; identical to SEQ ID NO: 6605
  Description of Artificial Sequence: Synthetic gluten; inner sequence and 3'  sequence

SEQ ID NO: 42743 - DNA, 53 bp, Artificial Sequence; identical to SEQ ID NO: 26877
  Description of Artificial Sequence: Synthetic gluten; inner sequence and 3'  sequence

SEQ ID NO: 42744 - DNA, 53 bp, Artificial Sequence
  Description of Artificial Sequence: Synthetic gluten; inner sequence and 3'  sequence
atggacttgcgaagggttctaacgctaacattgactagtacatgaccacttga

SEQ ID NO: 42745 - DNA, 53 bp, Artificial Sequence
  Description of Artificial Sequence: Synthetic gluten; inner sequence and 3'  sequence
cgaactggcatagttagattcgtacctggcttgactagtacatgaccacttga

SEQ ID NO: 42746 - DNA, 53 bp, Artificial Sequence
  Description of Artificial Sequence: Synthetic gluten; inner sequence and 3'  sequence
ccgcactcggacctcaagtgtacgacggcattgactagtacatgaccacttga

SEQ ID NO: 42747 - DNA, 53 bp, Artificial Sequence
  Description of Artificial Sequence: Synthetic gluten; inner sequence and 3'  sequence
acatatggccgaccgagtcactgcaatggattgactagtacatgaccacttga

SEQ ID NO: 42748 - DNA, 53 bp, Artificial Sequence
  Description of Artificial Sequence: Synthetic gluten; inner sequence and 3'  sequence
cattcgatgagcgtaggcagactaggcaggttgactagtacatgaccacttga

SEQ ID NO: 42749 - DNA, 53 bp, Artificial Sequence
  Description of Artificial Sequence: Synthetic gluten; inner sequence and 3'  sequence
ggcctgatcgaaactagagagtggcgtggattgactagtacatgaccacttga

SEQ ID NO: 42750 - DNA, 53 bp, Artificial Sequence
  Description of Artificial Sequence: Synthetic gluten; inner sequence and 3'  sequence
taggtccgaagcgcaatgtaataggcactattgactagtacatgaccacttga

SEQ ID NO: 42751 - DNA, 53 bp, Artificial Sequence
  Description of Artificial Sequence: Synthetic gluten; inner sequence and 3'  sequence
ggactgagcgacggaatgcactggtcaattttgactagtacatgaccacttga

SEQ ID NO: 42752 - DNA, 53 bp, Artificial Sequence
  Description of Artificial Sequence: Synthetic gluten; inner sequence and 3'  sequence
ggcctgcgatggatgaggagctgcactagtttgactagtacatgaccacttga

SEQ ID NO: 42753 - DNA, 53 bp, Artificial Sequence
  Description of Artificial Sequence: Synthetic gluten; inner sequence and 3'  sequence
ccgatcgaccgatgtcattctacggcagcattgactagtacatgaccacttga

SEQ ID NO: 42754 - DNA, 53 bp, Artificial Sequence
  Description of Artificial Sequence: Synthetic gluten; inner sequence and 3'  sequence
ggccgaacgcacacgagcgagatgtcaactttgactagtacatgaccacttga

SEQ ID NO: 42755 - DNA, 53 bp, Artificial Sequence
  Description of Artificial Sequence: Synthetic gluten; inner sequence and 3'  sequence
cattcgcgacccgtacatgggattgacgtattgactagtacatgaccacttga

SEQ ID NO: 42756 - DNA, 53 bp, Artificial Sequence
  Description of Artificial Sequence: Synthetic gluten; inner sequence and 3'  sequence
atggccgaatcgccacaagagcatgtcgaattgactagtacatgaccacttga

SEQ ID NO: 42757 - DNA, 53 bp, Artificial Sequence
  Description of Artificial Sequence: Synthetic gluten; inner sequence and 3'  sequence
ccttcgcgaaccgtgtcagcgtacgatggcttgactagtacatgaccacttga

SEQ ID NO: 42758 - DNA, 53 bp, Artificial Sequence
  Description of Artificial Sequence: Synthetic gluten; inner sequence and 3'  sequence
cgtaccgagtcagccgtaggtcactgtggattgactagtacatgaccacttga

SEQ ID NO: 42759 - DNA, 53 bp, Artificial Sequence
  Description of Artificial Sequence: Synthetic gluten; inner sequence and 3'  sequence
ggcatgcgaggaactagcaagtcgttcgtgttgactagtacatgaccacttga

SEQ ID NO: 42760 - DNA, 53 bp, Artificial Sequence
  Description of Artificial Sequence: Synthetic gluten; inner sequence and 3'  sequence
cgcgcatgcaaagaagagccgaagatccctttgactagtacatgaccacttga

SEQ ID NO: 42761 - DNA, 53 bp, Artificial Sequence
  Description of Artificial Sequence: Synthetic gluten; inner sequence and 3'  sequence
ccatctcgccccgtcaatgtgatcatgcacttgactagtacatgaccacttga

SEQ ID NO: 42762 - DNA, 53 bp, Artificial Sequence
  Description of Artificial Sequence: Synthetic gluten; inner sequence and 3'  sequence
gcagtcagatggacgacgagttcactaggtttgactagtacatgaccacttga

SEQ ID NO: 42763 - DNA, 53 bp, Artificial Sequence
  Description of Artificial Sequence: Synthetic gluten; inner sequence and 3'  sequence
ggcatgcgctgggtagtgatcacgtacggcttgactagtacatgaccacttga

SEQ ID NO: 42764 - DNA, 53 bp, Artificial Sequence
  Description of Artificial Sequence: Synthetic gluten; inner sequence and 3'  sequence
ggccgacctggatgtgagcatgcatctagattgactagtacatgaccacttga

SEQ ID NO: 42765 - DNA, 53 bp, Artificial Sequence; identical to SEQ ID NO: 6924
  Description of Artificial Sequence: Synthetic gluten; inner sequence and 3'  sequence

SEQ ID NO: 42766 - DNA, 54 bp, Artificial Sequence
  Description of Artificial Sequence: Synthetic gluten; inner sequence and 3'  sequence
ggcctgcgatggatgtgatcgtgcaatagtcttgactagtacatgaccacttga

SEQ ID NO: 42767 - DNA, 53 bp, Artificial Sequence
  Description of Artificial Sequence: Synthetic gluten; inner sequence and 3'  sequence
tgtcctgcgcgacctacgagtgggatggtattgactagtacatgaccacttga

SEQ ID NO: 42768 - DNA, 53 bp, Artificial Sequence
  Description of Artificial Sequence: Synthetic gluten; inner sequence and 3'  sequence
cgcacctactacatgcattaataaggtgtattgactagtacatgaccacttga

SEQ ID NO: 42769 - DNA, 53 bp, Artificial Sequence
  Description of Artificial Sequence: Synthetic gluten; inner sequence and 3'  sequence
gaacgcacgatgagcgccaagtgacatggattgactagtacatgaccacttga

SEQ ID NO: 42770 - DNA, 53 bp, Artificial Sequence
  Description of Artificial Sequence: Synthetic gluten; inner sequence and 3'  sequence
ggcctgctcgaacctagagagtggcgtggattgactagtacatgaccacttga

SEQ ID NO: 42771 - DNA, 53 bp, Artificial Sequence
  Description of Artificial Sequence: Synthetic gluten; inner sequence and 3'  sequence
atggacgaacgagcccaagtgcgccatggattgactagtacatgaccacttga

SEQ ID NO: 42772 - DNA, 53 bp, Artificial Sequence; identical to SEQ ID NO: 38546
  Description of Artificial Sequence: Synthetic gluten; inner sequence and 3'  sequence

SEQ ID NO: 42773 - DNA, 53 bp, Artificial Sequence
  Description of Artificial Sequence: Synthetic gluten; inner sequence and 3'  sequence
aggccgcactcgtcacgcaatggccatggattgactagtacatgaccacttga

SEQ ID NO: 42774 - DNA, 53 bp, Artificial Sequence
  Description of Artificial Sequence: Synthetic gluten; inner sequence and 3'  sequence
ggcatgcgaagtccagtggattgtgctcgtttgactagtacatgaccacttga

SEQ ID NO: 42775 - DNA, 53 bp, Artificial Sequence
  Description of Artificial Sequence: Synthetic gluten; inner sequence and 3'  sequence
catgcacgaactaacaggggactcctcatattgactagtacatgaccacttga

SEQ ID NO: 42776 - DNA, 53 bp, Artificial Sequence
  Description of Artificial Sequence: Synthetic gluten; inner sequence and 3'  sequence
ccatcagatggccgagtcgagtgatggtcgttgactagtacatgaccacttga

SEQ ID NO: 42777 - DNA, 52 bp, Artificial Sequence
  Description of Artificial Sequence: Synthetic gluten; inner sequence and 3'  sequence
ccaatcacatggccgatctggatgtgtgtttgactagtacatgaccacttga

SEQ ID NO: 42778 - DNA, 53 bp, Artificial Sequence
  Description of Artificial Sequence: Synthetic gluten; inner sequence and 3'  sequence
cttcccgcagaacatggcccgaacgtcatcttgactagtacatgaccacttga

SEQ ID NO: 42779 - DNA, 53 bp, Artificial Sequence
  Description of Artificial Sequence: Synthetic gluten; inner sequence and 3'  sequence
ccgatcgaccaaagaacatcgtgcgacggtttgactagtacatgaccacttga

SEQ ID NO: 42780 - DNA, 53 bp, Artificial Sequence
  Description of Artificial Sequence: Synthetic gluten; inner sequence and 3'  sequence
gtcatgcgcgtaccgtcaagtgcgaatggattgactagtacatgaccacttga

SEQ ID NO: 42781 - DNA, 53 bp, Artificial Sequence
  Description of Artificial Sequence: Synthetic gluten; inner sequence and 3'  sequence
tggcctgcgagtacctgtgatagtccttgattgactagtacatgaccacttga

SEQ ID NO: 42782 - DNA, 53 bp, Artificial Sequence
  Description of Artificial Sequence: Synthetic gluten; inner sequence and 3'  sequence
gtcattcgctgaacgttcaagggacgtggattgactagtacatgaccacttga

SEQ ID NO: 42783 - DNA, 53 bp, Artificial Sequence
  Description of Artificial Sequence: Synthetic gluten; inner sequence and 3'  sequence
catgtcgccaagagcacgtatgtcgtcatattgactagtacatgaccacttga

SEQ ID NO: 42784 - DNA, 53 bp, Artificial Sequence
  Description of Artificial Sequence: Synthetic gluten; inner sequence and 3'  sequence
ggcatgcgctgggtagcgatcacgtacggtttgactagtacatgaccacttga

SEQ ID NO: 42785 - DNA, 53 bp, Artificial Sequence
  Description of Artificial Sequence: Synthetic gluten; inner sequence and 3'  sequence
ccgaagcgagcctaggtctttacgctggctttgactagtacatgaccacttga

SEQ ID NO: 42786 - DNA, 53 bp, Artificial Sequence
  Description of Artificial Sequence: Synthetic gluten; inner sequence and 3'  sequence
acaatcacaattgacaaaacgtgcatgctgttgactagtacatgaccacttga

SEQ ID NO: 42787 - DNA, 53 bp, Artificial Sequence
  Description of Artificial Sequence: Synthetic gluten; inner sequence and 3'  sequence
cgcacgttacggaggataacggtatgggtattgactagtacatgaccacttga

SEQ ID NO: 42788 - DNA, 53 bp, Artificial Sequence
  Description of Artificial Sequence: Synthetic gluten; inner sequence and 3'  sequence
ggactgaacgcaccgaaatgtcaggacgcattgactagtacatgaccacttga

SEQ ID NO: 42789 - DNA, 53 bp, Artificial Sequence
  Description of Artificial Sequence: Synthetic gluten; inner sequence and 3'  sequence
ccgacaatgaccgtaatgagagcatgcgacttgactagtacatgaccacttga

SEQ ID NO: 42790 - DNA, 53 bp, Artificial Sequence
  Description of Artificial Sequence: Synthetic gluten; inner sequence and 3'  sequence
ccgttgatggactaaaggtgactactaagcttgactagtacatgaccacttga

SEQ ID NO: 42791 - DNA, 53 bp, Artificial Sequence
  Description of Artificial Sequence: Synthetic gluten; inner sequence and 3'  sequence
ggcctgcgctgggtagtgatcacgtacggtttgactagtacatgaccacttga

SEQ ID NO: 42792 - DNA, 53 bp, Artificial Sequence
  Description of Artificial Sequence: Synthetic gluten; inner sequence and 3'  sequence
caacaccactgcagtagattatggctcacgttgactagtacatgaccacttga

SEQ ID NO: 42793 - DNA, 52 bp, Artificial Sequence
  Description of Artificial Sequence: Synthetic gluten; inner sequence and 3'  sequence
tggccaagcgacctagcaagtgcagcatgttgactagtacatgaccacttga

SEQ ID NO: 42794 - DNA, 53 bp, Artificial Sequence
  Description of Artificial Sequence: Synthetic gluten; inner sequence and 3'  sequence
acgtccgacgaatgaggactagaggttgggttgactagtacatgaccacttga

SEQ ID NO: 42795 - DNA, 53 bp, Artificial Sequence; identical to SEQ ID NO: 2364
  Description of Artificial Sequence: Synthetic gluten; inner sequence and 3'  sequence

SEQ ID NO: 42796 - DNA, 53 bp, Artificial Sequence
  Description of Artificial Sequence: Synthetic gluten; inner sequence and 3'  sequence
ggccggctataccctacacgtgatcaggtattgactagtacatgaccacttga

SEQ ID NO: 42797 - DNA, 52 bp, Artificial Sequence
  Description of Artificial Sequence: Synthetic gluten; inner sequence and 3'  sequence
gtacgacgcggaccttcaagtcggccatgttgactagtacatgaccacttga

SEQ ID NO: 42798 - DNA, 53 bp, Artificial Sequence
  Description of Artificial Sequence: Synthetic gluten; inner sequence and 3'  sequence
catgtacgctaacggcaagcaatgctcatattgactagtacatgaccacttga

SEQ ID NO: 42799 - DNA, 53 bp, Artificial Sequence
  Description of Artificial Sequence: Synthetic gluten; inner sequence and 3'  sequence
ggactgctcagcacaaacgtgggcactggattgactagtacatgaccacttga

SEQ ID NO: 42800 - DNA, 53 bp, Artificial Sequence
  Description of Artificial Sequence: Synthetic gluten; inner sequence and 3'  sequence
ggacgacgatgaccggaatcaagcgtgtcattgactagtacatgaccacttga

SEQ ID NO: 42801 - DNA, 53 bp, Artificial Sequence
  Description of Artificial Sequence: Synthetic gluten; inner sequence and 3'  sequence
gtacgcaacgaaccgcaaggggatgtggacttgactagtacatgaccacttga

SEQ ID NO: 42802 - DNA, 53 bp, Artificial Sequence
  Description of Artificial Sequence: Synthetic gluten; inner sequence and 3'  sequence
tgacgtgcaggataagaacatggcctgagcttgactagtacatgaccacttga

SEQ ID NO: 42803 - DNA, 53 bp, Artificial Sequence
  Description of Artificial Sequence: Synthetic gluten; inner sequence and 3'  sequence
ccgactcggaaaggtacgtacggagattcattgactagtacatgaccacttga

SEQ ID NO: 42804 - DNA, 53 bp, Artificial Sequence; identical to SEQ ID NO: 2684
  Description of Artificial Sequence: Synthetic gluten; inner sequence and 3'  sequence

SEQ ID NO: 42805 - DNA, 53 bp, Artificial Sequence
  Description of Artificial Sequence: Synthetic gluten; inner sequence and 3'  sequence
ccgatcgacctcgtgtcaggtgcacagtcattgactagtacatgaccacttga

SEQ ID NO: 42806 - DNA, 53 bp, Artificial Sequence
  Description of Artificial Sequence: Synthetic gluten; inner sequence and 3'  sequence
tcatgccctgaacgctaatggacgacgggattgactagtacatgaccacttga

SEQ ID NO: 42807 - DNA, 53 bp, Artificial Sequence
  Description of Artificial Sequence: Synthetic gluten; inner sequence and 3'  sequence
cgcaccagcgatatgttgattagtacatccttgactagtacatgaccacttga

SEQ ID NO: 42808 - DNA, 53 bp, Artificial Sequence
  Description of Artificial Sequence: Synthetic gluten; inner sequence and 3'  sequence
agtgatcacaaagagcagacttgggcatctttgactagtacatgaccacttga

SEQ ID NO: 42809 - DNA, 53 bp, Artificial Sequence
  Description of Artificial Sequence: Synthetic gluten; inner sequence and 3'  sequence
acgaacagagccgaagagccttaagcaagcttgactagtacatgaccacttga

SEQ ID NO: 42810 - DNA, 53 bp, Artificial Sequence
  Description of Artificial Sequence: Synthetic gluten; inner sequence and 3'  sequence
gcgcagcagcagtagtcatgctctgggatgttgactagtacatgaccacttga

SEQ ID NO: 42811 - DNA, 53 bp, Artificial Sequence
  Description of Artificial Sequence: Synthetic gluten; inner sequence and 3'  sequence
tggccgacgattcccgttggacgaggccttttgactagtacatgaccacttga

SEQ ID NO: 42812 - DNA, 53 bp, Artificial Sequence
  Description of Artificial Sequence: Synthetic gluten; inner sequence and 3'  sequence
tcaacgtatgcctgaagaggacgcacaaggttgactagtacatgaccacttga

SEQ ID NO: 42813 - DNA, 52 bp, Artificial Sequence; identical to SEQ ID NO: 30887
  Description of Artificial Sequence: Synthetic gluten; inner sequence and 3'  sequence

SEQ ID NO: 42814 - DNA, 53 bp, Artificial Sequence
  Description of Artificial Sequence: Synthetic gluten; inner sequence and 3'  sequence
tcgagcacagatagagcatatggcacgatcttgactagtacatgaccacttga

SEQ ID NO: 42815 - DNA, 53 bp, Artificial Sequence
  Description of Artificial Sequence: Synthetic gluten; inner sequence and 3'  sequence
ggacagaacgaccgatcaagtgcgggtgtattgactagtacatgaccacttga

SEQ ID NO: 42816 - DNA, 53 bp, Artificial Sequence
  Description of Artificial Sequence: Synthetic gluten; inner sequence and 3'  sequence
gcacaagtcgccagtctgatccgagctcacttgactagtacatgaccacttga

SEQ ID NO: 42817 - DNA, 53 bp, Artificial Sequence
  Description of Artificial Sequence: Synthetic gluten; inner sequence and 3'  sequence
ccgagcggaaactgaattccatgcagtgtcttgactagtacatgaccacttga

SEQ ID NO: 42818 - DNA, 53 bp, Artificial Sequence
  Description of Artificial Sequence: Synthetic gluten; inner sequence and 3'  sequence
ccgaacgtacctgagaagcatagtccgatcttgactagtacatgaccacttga

SEQ ID NO: 42819 - DNA, 53 bp, Artificial Sequence
  Description of Artificial Sequence: Synthetic gluten; inner sequence and 3'  sequence
cgtcagcatgacgaagatttgagccggagattgactagtacatgaccacttga

SEQ ID NO: 42820 - DNA, 53 bp, Artificial Sequence
  Description of Artificial Sequence: Synthetic gluten; inner sequence and 3'  sequence
gaactgcgatggaatgggctgtatgcgtctttgactagtacatgaccacttga

SEQ ID NO: 42821 - DNA, 53 bp, Artificial Sequence
  Description of Artificial Sequence: Synthetic gluten; inner sequence and 3'  sequence
catgtacataccgagacaatcttgttcatattgactagtacatgaccacttga

SEQ ID NO: 42822 - DNA, 53 bp, Artificial Sequence
  Description of Artificial Sequence: Synthetic gluten; inner sequence and 3'  sequence
ggcatgcgatgcactacaagttgttgtgtattgactagtacatgaccacttga

SEQ ID NO: 42823 - DNA, 53 bp, Artificial Sequence
  Description of Artificial Sequence: Synthetic gluten; inner sequence and 3'  sequence
ccgaacgcgcccttcaagtgcatggctgtcttgactagtacatgaccacttga

SEQ ID NO: 42824 - DNA, 53 bp, Artificial Sequence
  Description of Artificial Sequence: Synthetic gluten; inner sequence and 3'  sequence
ggcctgatcgaacctcaagctggacatggattgactagtacatgaccacttga

SEQ ID NO: 42825 - DNA, 53 bp, Artificial Sequence
  Description of Artificial Sequence: Synthetic gluten; inner sequence and 3'  sequence
ggcctgagctgcactagtagagtcaaattattgactagtacatgaccacttga

SEQ ID NO: 42826 - DNA, 53 bp, Artificial Sequence
  Description of Artificial Sequence: Synthetic gluten; inner sequence and 3'  sequence
cgtaccgcaagtgacgtgtccgtgccgggattgactagtacatgaccacttga

SEQ ID NO: 42827 - DNA, 53 bp, Artificial Sequence
  Description of Artificial Sequence: Synthetic gluten; inner sequence and 3'  sequence
cctgagcgaccgtagacctgtctagacacattgactagtacatgaccacttga

SEQ ID NO: 42828 - DNA, 53 bp, Artificial Sequence; identical to SEQ ID NO: 6721
  Description of Artificial Sequence: Synthetic gluten; inner sequence and 3'  sequence

SEQ ID NO: 42829 - DNA, 53 bp, Artificial Sequence
  Description of Artificial Sequence: Synthetic gluten; inner sequence and 3'  sequence
ggacgcaacgtaccgcatcgtggccatgtgttgactagtacatgaccacttga

SEQ ID NO: 42830 - DNA, 53 bp, Artificial Sequence
  Description of Artificial Sequence: Synthetic gluten; inner sequence and 3'  sequence
ccgcacagggcattgaaaatctcctacggcttgactagtacatgaccacttga

SEQ ID NO: 42831 - DNA, 53 bp, Artificial Sequence
  Description of Artificial Sequence: Synthetic gluten; inner sequence and 3'  sequence
ggccgatgctgcactagtctcaagttgtcattgactagtacatgaccacttga

SEQ ID NO: 42832 - DNA, 53 bp, Artificial Sequence; identical to SEQ ID NO: 6616
  Description of Artificial Sequence: Synthetic gluten; inner sequence and 3'  sequence

SEQ ID NO: 42833 - DNA, 53 bp, Artificial Sequence
  Description of Artificial Sequence: Synthetic gluten; inner sequence and 3'  sequence
ggccgaagcttccctattcgtacggcagcattgactagtacatgaccacttga

SEQ ID NO: 42834 - DNA, 53 bp, Artificial Sequence
  Description of Artificial Sequence: Synthetic gluten; inner sequence and 3'  sequence
tggccggatctgacctgtccctagttgcgattgactagtacatgaccacttga

SEQ ID NO: 42835 - DNA, 53 bp, Artificial Sequence
  Description of Artificial Sequence: Synthetic gluten; inner sequence and 3'  sequence
gtcatgcgcggacattccagttggcgtggattgactagtacatgaccacttga

SEQ ID NO: 42836 - DNA, 53 bp, Artificial Sequence; identical to SEQ ID NO: 6713
  Description of Artificial Sequence: Synthetic gluten; inner sequence and 3'  sequence

SEQ ID NO: 42837 - DNA, 53 bp, Artificial Sequence
  Description of Artificial Sequence: Synthetic gluten; inner sequence and 3'  sequence
cgtaccgcaagtgacgtgtccgagccgtgattgactagtacatgaccacttga

SEQ ID NO: 42838 - DNA, 53 bp, Artificial Sequence
  Description of Artificial Sequence: Synthetic gluten; inner sequence and 3'  sequence
ccacatgccgtatcggtttgcggactaacattgactagtacatgaccacttga

SEQ ID NO: 42839 - DNA, 53 bp, Artificial Sequence
  Description of Artificial Sequence: Synthetic gluten; inner sequence and 3'  sequence
tggcctgctcgacctgtatcaggcactaggttgactagtacatgaccacttga

SEQ ID NO: 42840 - DNA, 53 bp, Artificial Sequence
  Description of Artificial Sequence: Synthetic gluten; inner sequence and 3'  sequence
ggactgaacgaccgaattacgcttgtcacattgactagtacatgaccacttga

SEQ ID NO: 42841 - DNA, 53 bp, Artificial Sequence
  Description of Artificial Sequence: Synthetic gluten; inner sequence and 3'  sequence
ggactgcgcgtgacctatcaatggcatgcattgactagtacatgaccacttga

SEQ ID NO: 42842 - DNA, 53 bp, Artificial Sequence
  Description of Artificial Sequence: Synthetic gluten; inner sequence and 3'  sequence
gtacgcacgctgagcgccaagtgacatggattgactagtacatgaccacttga

SEQ ID NO: 42843 - DNA, 53 bp, Artificial Sequence
  Description of Artificial Sequence: Synthetic gluten; inner sequence and 3'  sequence
ggaacgcacgaagccctgtactaaggcaaattgactagtacatgaccacttga

SEQ ID NO: 42844 - DNA, 53 bp, Artificial Sequence
  Description of Artificial Sequence: Synthetic gluten; inner sequence and 3'  sequence
cgtaccgcaagtgacgagtccgtgccgtgattgactagtacatgaccacttga

SEQ ID NO: 42845 - DNA, 53 bp, Artificial Sequence; identical to SEQ ID NO: 6700
  Description of Artificial Sequence: Synthetic gluten; inner sequence and 3'  sequence

SEQ ID NO: 42846 - DNA, 53 bp, Artificial Sequence
  Description of Artificial Sequence: Synthetic gluten; inner sequence and 3'  sequence
ccgtaccgtcgcaagtgctatcttccgatcttgactagtacatgaccacttga

SEQ ID NO: 42847 - DNA, 53 bp, Artificial Sequence
  Description of Artificial Sequence: Synthetic gluten; inner sequence and 3'  sequence
cgaagcatgtcaagagccgaagacaccatattgactagtacatgaccacttga

SEQ ID NO: 42848 - DNA, 53 bp, Artificial Sequence
  Description of Artificial Sequence: Synthetic gluten; inner sequence and 3'  sequence
gacagcggagcgggagcacaagagtggcatttgactagtacatgaccacttga

SEQ ID NO: 42849 - DNA, 53 bp, Artificial Sequence
  Description of Artificial Sequence: Synthetic gluten; inner sequence and 3'  sequence
ggcatgcgatctcactatcaagtgttggcattgactagtacatgaccacttga

SEQ ID NO: 42850 - DNA, 53 bp, Artificial Sequence
  Description of Artificial Sequence: Synthetic gluten; inner sequence and 3'  sequence
ggccacgcctgccctaccagtgctcatggattgactagtacatgaccacttga

SEQ ID NO: 42851 - DNA, 53 bp, Artificial Sequence
  Description of Artificial Sequence: Synthetic gluten; inner sequence and 3'  sequence
tcagatggcctcatcgtcactatctagtcattgactagtacatgaccacttga

SEQ ID NO: 42852 - DNA, 53 bp, Artificial Sequence; identical to SEQ ID NO: 2164
  Description of Artificial Sequence: Synthetic gluten; inner sequence and 3'  sequence

SEQ ID NO: 42853 - DNA, 53 bp, Artificial Sequence
  Description of Artificial Sequence: Synthetic gluten; inner sequence and 3'  sequence
cgaacgacctaaacgtcagaataggcagtattgactagtacatgaccacttga

SEQ ID NO: 42854 - DNA, 53 bp, Artificial Sequence
  Description of Artificial Sequence: Synthetic gluten; inner sequence and 3'  sequence
tgagatcaccgcaagacaaggggacggcgattgactagtacatgaccacttga

SEQ ID NO: 42855 - DNA, 53 bp, Artificial Sequence
  Description of Artificial Sequence: Synthetic gluten; inner sequence and 3'  sequence
ggccgaactcgtccccttaacgtacgtggcttgactagtacatgaccacttga

SEQ ID NO: 42856 - DNA, 53 bp, Artificial Sequence
  Description of Artificial Sequence: Synthetic gluten; inner sequence and 3'  sequence
aatatggccgccgaggaagtactatcaatgttgactagtacatgaccacttga

SEQ ID NO: 42857 - DNA, 53 bp, Artificial Sequence
  Description of Artificial Sequence: Synthetic gluten; inner sequence and 3'  sequence
tgtccgacacttcacgctgagatcgtactgttgactagtacatgaccacttga

SEQ ID NO: 42858 - DNA, 53 bp, Artificial Sequence
  Description of Artificial Sequence: Synthetic gluten; inner sequence and 3'  sequence
accgtcatgcgaaagtcatatctcggcccgttgactagtacatgaccacttga

SEQ ID NO: 42859 - DNA, 53 bp, Artificial Sequence; identical to SEQ ID NO: 38602
  Description of Artificial Sequence: Synthetic gluten; inner sequence and 3'  sequence

SEQ ID NO: 42860 - DNA, 53 bp, Artificial Sequence
  Description of Artificial Sequence: Synthetic gluten; inner sequence and 3'  sequence
cgtatggtcgagcgtaccttcaaggagtcattgactagtacatgaccacttga

SEQ ID NO: 42861 - DNA, 53 bp, Artificial Sequence
  Description of Artificial Sequence: Synthetic gluten; inner sequence and 3'  sequence
catgacgtgtgaagcagccatgctgtcatattgactagtacatgaccacttga

SEQ ID NO: 42862 - DNA, 53 bp, Artificial Sequence
  Description of Artificial Sequence: Synthetic gluten; inner sequence and 3'  sequence
cctgatcaggcatagatgaccggcaacggattgactagtacatgaccacttga

SEQ ID NO: 42863 - DNA, 52 bp, Artificial Sequence
  Description of Artificial Sequence: Synthetic gluten; inner sequence and 3'  sequence
ccgtatcgtaccgtacatgtgcgtatcaattgactagtacatgaccacttga

SEQ ID NO: 42864 - DNA, 53 bp, Artificial Sequence
  Description of Artificial Sequence: Synthetic gluten; inner sequence and 3'  sequence
cctgaacggccctacagagcgtacgaagcattgactagtacatgaccacttga

SEQ ID NO: 42865 - DNA, 52 bp, Artificial Sequence
  Description of Artificial Sequence: Synthetic gluten; inner sequence and 3'  sequence
tgacctgagctgaacgaagaccgctagtcttgactagtacatgaccacttga

SEQ ID NO: 42866 - DNA, 53 bp, Artificial Sequence
  Description of Artificial Sequence: Synthetic gluten; inner sequence and 3'  sequence
cgtgacaaacaaggatctaccagcttcgccttgactagtacatgaccacttga

SEQ ID NO: 42867 - DNA, 53 bp, Artificial Sequence
  Description of Artificial Sequence: Synthetic gluten; inner sequence and 3'  sequence
tgtccagatcgacctacatgtctaggcaatttgactagtacatgaccacttga

SEQ ID NO: 42868 - DNA, 53 bp, Artificial Sequence
  Description of Artificial Sequence: Synthetic gluten; inner sequence and 3'  sequence
tggccgactgacctagcagagcatggcatcttgactagtacatgaccacttga

SEQ ID NO: 42869 - DNA, 53 bp, Artificial Sequence; identical to SEQ ID NO: 38927
  Description of Artificial Sequence: Synthetic gluten; inner sequence and 3'  sequence

SEQ ID NO: 42870 - DNA, 53 bp, Artificial Sequence; identical to SEQ ID NO: 2097
  Description of Artificial Sequence: Synthetic gluten; inner sequence and 3'  sequence

SEQ ID NO: 42871 - DNA, 53 bp, Artificial Sequence
  Description of Artificial Sequence: Synthetic gluten; inner sequence and 3'  sequence
ctgagccgaagatcctgtctttactcatgattgactagtacatgaccacttga

SEQ ID NO: 42872 - DNA, 53 bp, Artificial Sequence; identical to SEQ ID NO: 38514
  Description of Artificial Sequence: Synthetic gluten; inner sequence and 3'  sequence

SEQ ID NO: 42873 - DNA, 53 bp, Artificial Sequence
  Description of Artificial Sequence: Synthetic gluten; inner sequence and 3'  sequence
ggacgacctggatgtgagcatgcatctagtttgactagtacatgaccacttga

SEQ ID NO: 42874 - DNA, 53 bp, Artificial Sequence
  Description of Artificial Sequence: Synthetic gluten; inner sequence and 3'  sequence
ttggcatgcgatggaaggtcagctagttcattgactagtacatgaccacttga

SEQ ID NO: 42875 - DNA, 53 bp, Artificial Sequence
  Description of Artificial Sequence: Synthetic gluten; inner sequence and 3'  sequence
ttggcctgagctgaactgttaaatgtgtgtttgactagtacatgaccacttga

SEQ ID NO: 42876 - DNA, 53 bp, Artificial Sequence
  Description of Artificial Sequence: Synthetic gluten; inner sequence and 3'  sequence
cgcatagggccgagacagctacgactagtgttgactagtacatgaccacttga

SEQ ID NO: 42877 - DNA, 53 bp, Artificial Sequence; identical to SEQ ID NO: 6798
  Description of Artificial Sequence: Synthetic gluten; inner sequence and 3'  sequence

SEQ ID NO: 42878 - DNA, 53 bp, Artificial Sequence
  Description of Artificial Sequence: Synthetic gluten; inner sequence and 3'  sequence
ccgacgatgaactatgtacttagtgtctgattgactagtacatgaccacttga

SEQ ID NO: 42879 - DNA, 53 bp, Artificial Sequence
  Description of Artificial Sequence: Synthetic gluten; inner sequence and 3'  sequence
cacatcaaataggcctgagcgtatggactattgactagtacatgaccacttga

SEQ ID NO: 42880 - DNA, 53 bp, Artificial Sequence
  Description of Artificial Sequence: Synthetic gluten; inner sequence and 3'  sequence
gacgactcgaaccaaggaaatggactgggcttgactagtacatgaccacttga

SEQ ID NO: 42881 - DNA, 53 bp, Artificial Sequence
  Description of Artificial Sequence: Synthetic gluten; inner sequence and 3'  sequence
gctccagatcgcaccttcaagttcggcatgttgactagtacatgaccacttga

SEQ ID NO: 42882 - DNA, 53 bp, Artificial Sequence
  Description of Artificial Sequence: Synthetic gluten; inner sequence and 3'  sequence
tggcctgagcgaccacatgtctgtcaatcgttgactagtacatgaccacttga

SEQ ID NO: 42883 - DNA, 53 bp, Artificial Sequence
  Description of Artificial Sequence: Synthetic gluten; inner sequence and 3'  sequence
cgtaacgtcggtaaccttgaagcggtaagtttgactagtacatgaccacttga

SEQ ID NO: 42884 - DNA, 53 bp, Artificial Sequence; identical to SEQ ID NO: 2635
  Description of Artificial Sequence: Synthetic gluten; inner sequence and 3'  sequence

SEQ ID NO: 42885 - DNA, 53 bp, Artificial Sequence
  Description of Artificial Sequence: Synthetic gluten; inner sequence and 3'  sequence
tcgtaccgtcaaagtgcttggatcttcaggttgactagtacatgaccacttga

SEQ ID NO: 42886 - DNA, 53 bp, Artificial Sequence
  Description of Artificial Sequence: Synthetic gluten; inner sequence and 3'  sequence
tggactgctattcacggcgagaatgtcaatttgactagtacatgaccacttga

SEQ ID NO: 42887 - DNA, 52 bp, Artificial Sequence
  Description of Artificial Sequence: Synthetic gluten; inner sequence and 3'  sequence
ggcatgcgatggatgtggatggccagtctttgactagtacatgaccacttga

SEQ ID NO: 42888 - DNA, 53 bp, Artificial Sequence; identical to SEQ ID NO: 6722
  Description of Artificial Sequence: Synthetic gluten; inner sequence and 3'  sequence

SEQ ID NO: 42889 - DNA, 53 bp, Artificial Sequence
  Description of Artificial Sequence: Synthetic gluten; inner sequence and 3'  sequence
ccgaatcgacctcaagaacactgctcgacgttgactagtacatgaccacttga

SEQ ID NO: 42890 - DNA, 53 bp, Artificial Sequence
  Description of Artificial Sequence: Synthetic gluten; inner sequence and 3'  sequence
tggccgaagcttccctagagacggacgtatttgactagtacatgaccacttga

SEQ ID NO: 42891 - DNA, 53 bp, Artificial Sequence
  Description of Artificial Sequence: Synthetic gluten; inner sequence and 3'  sequence
cgaccgacaaacactaattggcatcggggtttgactagtacatgaccacttga

SEQ ID NO: 42892 - DNA, 53 bp, Artificial Sequence
  Description of Artificial Sequence: Synthetic gluten; inner sequence and 3'  sequence
atgcctgcgatgaccgtggcatgcactatattgactagtacatgaccacttga

SEQ ID NO: 42893 - DNA, 53 bp, Artificial Sequence
  Description of Artificial Sequence: Synthetic gluten; inner sequence and 3'  sequence
tgagcaacgcgaagaatagggctgttcgaattgactagtacatgaccacttga

SEQ ID NO: 42894 - DNA, 53 bp, Artificial Sequence
  Description of Artificial Sequence: Synthetic gluten; inner sequence and 3'  sequence
gtacgtcgacagacctcaagttggcgtgtattgactagtacatgaccacttga

SEQ ID NO: 42895 - DNA, 53 bp, Artificial Sequence
  Description of Artificial Sequence: Synthetic gluten; inner sequence and 3'  sequence
tgtcatgcgatgaactggcgtggtccttgcttgactagtacatgaccacttga

SEQ ID NO: 42896 - DNA, 53 bp, Artificial Sequence
  Description of Artificial Sequence: Synthetic gluten; inner sequence and 3'  sequence
cctgctcgaccgtcaagtgaaatggcgctgttgactagtacatgaccacttga

SEQ ID NO: 42897 - DNA, 52 bp, Artificial Sequence
  Description of Artificial Sequence: Synthetic gluten; inner sequence and 3'  sequence
ctatcacatggcctgcctacttactgtcattgactagtacatgaccacttga

SEQ ID NO: 42898 - DNA, 53 bp, Artificial Sequence
  Description of Artificial Sequence: Synthetic gluten; inner sequence and 3'  sequence
catccccaacgatcggcatatggcattcgattgactagtacatgaccacttga

SEQ ID NO: 42899 - DNA, 53 bp, Artificial Sequence; identical to SEQ ID NO: 30272
  Description of Artificial Sequence: Synthetic gluten; inner sequence and 3'  sequence

SEQ ID NO: 42900 - DNA, 53 bp, Artificial Sequence
  Description of Artificial Sequence: Synthetic gluten; inner sequence and 3'  sequence
acattgccgcaatgggaatatgaactgcgcttgactagtacatgaccacttga

SEQ ID NO: 42901 - DNA, 53 bp, Artificial Sequence
  Description of Artificial Sequence: Synthetic gluten; inner sequence and 3'  sequence
agcaactcactacaagatcatttccgccggttgactagtacatgaccacttga

SEQ ID NO: 42902 - DNA, 53 bp, Artificial Sequence
  Description of Artificial Sequence: Synthetic gluten; inner sequence and 3'  sequence
cgatgaggcgaagcaatctgacggggtcaattgactagtacatgaccacttga

SEQ ID NO: 42903 - DNA, 53 bp, Artificial Sequence
  Description of Artificial Sequence: Synthetic gluten; inner sequence and 3'  sequence
ggcctgatcgaacctagagagtggcggggattgactagtacatgaccacttga

SEQ ID NO: 42904 - DNA, 53 bp, Artificial Sequence
  Description of Artificial Sequence: Synthetic gluten; inner sequence and 3'  sequence
cagatggccgaagctgcactacatgtggacttgactagtacatgaccacttga

SEQ ID NO: 42905 - DNA, 53 bp, Artificial Sequence
  Description of Artificial Sequence: Synthetic gluten; inner sequence and 3'  sequence
cgacctgggtgaaccgaagatgctgtcacattgactagtacatgaccacttga

SEQ ID NO: 42906 - DNA, 53 bp, Artificial Sequence
  Description of Artificial Sequence: Synthetic gluten; inner sequence and 3'  sequence
ggcctgcgctggaatgtgcgaatgtacgcattgactagtacatgaccacttga

SEQ ID NO: 42907 - DNA, 49 bp, Artificial Sequence
  Description of Artificial Sequence: Synthetic gluten; inner sequence and 3'  sequence
ggcattcgatgcactacaagtcgtcattgactagtacatgaccacttga

SEQ ID NO: 42908 - DNA, 53 bp, Artificial Sequence
  Description of Artificial Sequence: Synthetic gluten; inner sequence and 3'  sequence
ggcctgatcgaacctagagtgtggcgtggattgactagtacatgaccacttga

SEQ ID NO: 42909 - DNA, 53 bp, Artificial Sequence
  Description of Artificial Sequence: Synthetic gluten; inner sequence and 3'  sequence
ggcatgacgcattccctaaagtggcaggtattgactagtacatgaccacttga

SEQ ID NO: 42910 - DNA, 53 bp, Artificial Sequence
  Description of Artificial Sequence: Synthetic gluten; inner sequence and 3'  sequence
ggcctgatcgaacctagagagtggtgtggattgactagtacatgaccacttga

SEQ ID NO: 42911 - DNA, 53 bp, Artificial Sequence
  Description of Artificial Sequence: Synthetic gluten; inner sequence and 3'  sequence
ggccgacgatggatgtggatgtattggtctttgactagtacatgaccacttga

SEQ ID NO: 42912 - DNA, 53 bp, Artificial Sequence; identical to SEQ ID NO: 38504
  Description of Artificial Sequence: Synthetic gluten; inner sequence and 3'  sequence

SEQ ID NO: 42913 - DNA, 53 bp, Artificial Sequence
  Description of Artificial Sequence: Synthetic gluten; inner sequence and 3'  sequence
gccagcagaggacttcaaggtgagtacatattgactagtacatgaccacttga

SEQ ID NO: 42914 - DNA, 53 bp, Artificial Sequence
  Description of Artificial Sequence: Synthetic gluten; inner sequence and 3'  sequence
agaactcgtgtacgtggagagagatccggattgactagtacatgaccacttga

SEQ ID NO: 42915 - DNA, 53 bp, Artificial Sequence
  Description of Artificial Sequence: Synthetic gluten; inner sequence and 3'  sequence
acgcaccacgatgaggatccgctcttcacgttgactagtacatgaccacttga

SEQ ID NO: 42916 - DNA, 53 bp, Artificial Sequence
  Description of Artificial Sequence: Synthetic gluten; inner sequence and 3'  sequence
ggcatgcgctgggtagtgatcacgtacgggttgactagtacatgaccacttga

SEQ ID NO: 42917 - DNA, 53 bp, Artificial Sequence
  Description of Artificial Sequence: Synthetic gluten; inner sequence and 3'  sequence
gtcatgatcggatgtggatgtggactcgacttgactagtacatgaccacttga

SEQ ID NO: 42918 - DNA, 53 bp, Artificial Sequence; identical to SEQ ID NO: 6688
  Description of Artificial Sequence: Synthetic gluten; inner sequence and 3'  sequence

SEQ ID NO: 42919 - DNA, 53 bp, Artificial Sequence
  Description of Artificial Sequence: Synthetic gluten; inner sequence and 3'  sequence
gtacgacgcggaccttcaagtaggcgcgtattgactagtacatgaccacttga

SEQ ID NO: 42920 - DNA, 53 bp, Artificial Sequence
  Description of Artificial Sequence: Synthetic gluten; inner sequence and 3'  sequence
ggcattcgatgcactacaagttgttgtgcattgactagtacatgaccacttga

SEQ ID NO: 42921 - DNA, 53 bp, Artificial Sequence; identical to SEQ ID NO: 6710
  Description of Artificial Sequence: Synthetic gluten; inner sequence and 3'  sequence

SEQ ID NO: 42922 - DNA, 53 bp, Artificial Sequence
  Description of Artificial Sequence: Synthetic gluten; inner sequence and 3'  sequence
ccaatcgaccgcgtggacttgcactgggccttgactagtacatgaccacttga

SEQ ID NO: 42923 - DNA, 53 bp, Artificial Sequence
  Description of Artificial Sequence: Synthetic gluten; inner sequence and 3'  sequence
ggcatgacgcgaccccttcaagctgtgtcattgactagtacatgaccacttga

SEQ ID NO: 42924 - DNA, 53 bp, Artificial Sequence
  Description of Artificial Sequence: Synthetic gluten; inner sequence and 3'  sequence
tccatcacaggtccggagaacggctacgacttgactagtacatgaccacttga

SEQ ID NO: 42925 - DNA, 53 bp, Artificial Sequence
  Description of Artificial Sequence: Synthetic gluten; inner sequence and 3'  sequence
cgacagagcgaatggcaatctccagtcacattgactagtacatgaccacttga

SEQ ID NO: 42926 - DNA, 53 bp, Artificial Sequence
  Description of Artificial Sequence: Synthetic gluten; inner sequence and 3'  sequence
taatccaagatgcagcagatggacgacctcttgactagtacatgaccacttga

SEQ ID NO: 42927 - DNA, 53 bp, Artificial Sequence
  Description of Artificial Sequence: Synthetic gluten; inner sequence and 3'  sequence
ggccgatcgtacctggtgatgtgcgtatccttgactagtacatgaccacttga

SEQ ID NO: 42928 - DNA, 53 bp, Artificial Sequence; identical to SEQ ID NO: 2972
  Description of Artificial Sequence: Synthetic gluten; inner sequence and 3'  sequence

SEQ ID NO: 42929 - DNA, 53 bp, Artificial Sequence
  Description of Artificial Sequence: Synthetic gluten; inner sequence and 3'  sequence
acgatctggacacagctgacaggaacgcaattgactagtacatgaccacttga

SEQ ID NO: 42930 - DNA, 53 bp, Artificial Sequence
  Description of Artificial Sequence: Synthetic gluten; inner sequence and 3'  sequence
ggccgtgggagaaactagcgctacgtacgattgactagtacatgaccacttga

SEQ ID NO: 42931 - DNA, 53 bp, Artificial Sequence
  Description of Artificial Sequence: Synthetic gluten; inner sequence and 3'  sequence
acttcgcgaccctagcatgctacgtacgttttgactagtacatgaccacttga

SEQ ID NO: 42932 - DNA, 53 bp, Artificial Sequence
  Description of Artificial Sequence: Synthetic gluten; inner sequence and 3'  sequence
tggcctgagcgaaactagtactagccatgcttgactagtacatgaccacttga

SEQ ID NO: 42933 - DNA, 53 bp, Artificial Sequence
  Description of Artificial Sequence: Synthetic gluten; inner sequence and 3'  sequence
cccatcagatggcctaatctgagtcaggcattgactagtacatgaccacttga

SEQ ID NO: 42934 - DNA, 53 bp, Artificial Sequence
  Description of Artificial Sequence: Synthetic gluten; inner sequence and 3'  sequence
ggcccgactccctatcagtggcacgtactattgactagtacatgaccacttga

SEQ ID NO: 42935 - DNA, 53 bp, Artificial Sequence
  Description of Artificial Sequence: Synthetic gluten; inner sequence and 3'  sequence
cgaaccagagagcagttctaggcaatctcattgactagtacatgaccacttga

SEQ ID NO: 42936 - DNA, 53 bp, Artificial Sequence
  Description of Artificial Sequence: Synthetic gluten; inner sequence and 3'  sequence
ggcatgctctgaccgaacgtgctaatggctttgactagtacatgaccacttga

SEQ ID NO: 42937 - DNA, 53 bp, Artificial Sequence
  Description of Artificial Sequence: Synthetic gluten; inner sequence and 3'  sequence
catggcgaagggggcagtcacctgctcatattgactagtacatgaccacttga

SEQ ID NO: 42938 - DNA, 53 bp, Artificial Sequence
  Description of Artificial Sequence: Synthetic gluten; inner sequence and 3'  sequence
ggcccgaatcccttcaagatgggcgatggattgactagtacatgaccacttga

SEQ ID NO: 42939 - DNA, 53 bp, Artificial Sequence
  Description of Artificial Sequence: Synthetic gluten; inner sequence and 3'  sequence
acttctcggaacggcatgtgaatcgtcgaattgactagtacatgaccacttga

SEQ ID NO: 42940 - DNA, 53 bp, Artificial Sequence
  Description of Artificial Sequence: Synthetic gluten; inner sequence and 3'  sequence
cctcatacggccgactctgagtgcaagttattgactagtacatgaccacttga

SEQ ID NO: 42941 - DNA, 53 bp, Artificial Sequence
  Description of Artificial Sequence: Synthetic gluten; inner sequence and 3'  sequence
tcacagcatggtggatttgcaaaccctcaattgactagtacatgaccacttga

SEQ ID NO: 42942 - DNA, 53 bp, Artificial Sequence
  Description of Artificial Sequence: Synthetic gluten; inner sequence and 3'  sequence
tgcaacgcggcttgcttcctactaccgtccttgactagtacatgaccacttga

SEQ ID NO: 42943 - DNA, 53 bp, Artificial Sequence
  Description of Artificial Sequence: Synthetic gluten; inner sequence and 3'  sequence
ggcctgcgatgaccgtcaagctaacttgcgttgactagtacatgaccacttga

SEQ ID NO: 42944 - DNA, 53 bp, Artificial Sequence
  Description of Artificial Sequence: Synthetic gluten; inner sequence and 3'  sequence
ccgattgacataccgaccggatcagcatgattgactagtacatgaccacttga

SEQ ID NO: 42945 - DNA, 53 bp, Artificial Sequence
  Description of Artificial Sequence: Synthetic gluten; inner sequence and 3'  sequence
tgactgaacgaaccgtccatgaacgtaggtttgactagtacatgaccacttga

SEQ ID NO: 42946 - DNA, 53 bp, Artificial Sequence
  Description of Artificial Sequence: Synthetic gluten; inner sequence and 3'  sequence
gctccgacgatggaaggacgtggcagtcaattgactagtacatgaccacttga

SEQ ID NO: 42947 - DNA, 53 bp, Artificial Sequence
  Description of Artificial Sequence: Synthetic gluten; inner sequence and 3'  sequence
acatggcctgaacgaaatcgacggcacttgttgactagtacatgaccacttga

SEQ ID NO: 42948 - DNA, 53 bp, Artificial Sequence
  Description of Artificial Sequence: Synthetic gluten; inner sequence and 3'  sequence
gatgagccgaagagagggaaatagggactattgactagtacatgaccacttga

SEQ ID NO: 42949 - DNA, 53 bp, Artificial Sequence
  Description of Artificial Sequence: Synthetic gluten; inner sequence and 3'  sequence
cgtcctgagctgaccgtctgtctctggcatttgactagtacatgaccacttga

SEQ ID NO: 42950 - DNA, 53 bp, Artificial Sequence
  Description of Artificial Sequence: Synthetic gluten; inner sequence and 3'  sequence
gaactgaacgcaccgttttctaggcaagcattgactagtacatgaccacttga

SEQ ID NO: 42951 - DNA, 53 bp, Artificial Sequence; identical to SEQ ID NO: 6925
  Description of Artificial Sequence: Synthetic gluten; inner sequence and 3'  sequence

SEQ ID NO: 42952 - DNA, 53 bp, Artificial Sequence
  Description of Artificial Sequence: Synthetic gluten; inner sequence and 3'  sequence
ggcctgatcgaacctagagagcggcgtgggttgactagtacatgaccacttga

SEQ ID NO: 42953 - DNA, 53 bp, Artificial Sequence
  Description of Artificial Sequence: Synthetic gluten; inner sequence and 3'  sequence
cgcaagccgtagtaaatcataccgagaggcttgactagtacatgaccacttga

SEQ ID NO: 42954 - DNA, 53 bp, Artificial Sequence
  Description of Artificial Sequence: Synthetic gluten; inner sequence and 3'  sequence
ggcctgcgatggaatgagcgaatgtacgcattgactagtacatgaccacttga

SEQ ID NO: 42955 - DNA, 53 bp, Artificial Sequence
  Description of Artificial Sequence: Synthetic gluten; inner sequence and 3'  sequence
catgtggccgactgaactagcaagctggtcttgactagtacatgaccacttga

SEQ ID NO: 42956 - DNA, 53 bp, Artificial Sequence
  Description of Artificial Sequence: Synthetic gluten; inner sequence and 3'  sequence
cgaaccgctgtatgctcaacgtatggtggtttgactagtacatgaccacttga

SEQ ID NO: 42957 - DNA, 53 bp, Artificial Sequence
  Description of Artificial Sequence: Synthetic gluten; inner sequence and 3'  sequence
ggcattcgatgcactacacgttgttgtgtattgactagtacatgaccacttga

SEQ ID NO: 42958 - DNA, 53 bp, Artificial Sequence
  Description of Artificial Sequence: Synthetic gluten; inner sequence and 3'  sequence
tacgcaacgaccctatcgagaggacatgtattgactagtacatgaccacttga

SEQ ID NO: 42959 - DNA, 53 bp, Artificial Sequence
  Description of Artificial Sequence: Synthetic gluten; inner sequence and 3'  sequence
gcttgagccgaagaccctacaatcagatgattgactagtacatgaccacttga

SEQ ID NO: 42960 - DNA, 52 bp, Artificial Sequence
  Description of Artificial Sequence: Synthetic gluten; inner sequence and 3'  sequence
tggacggaagaaagctactactggcagcattgactagtacatgaccacttga

SEQ ID NO: 42961 - DNA, 53 bp, Artificial Sequence
  Description of Artificial Sequence: Synthetic gluten; inner sequence and 3'  sequence
catgactacacttgctcccaaagaggcatattgactagtacatgaccacttga

SEQ ID NO: 42962 - DNA, 51 bp, Artificial Sequence
  Description of Artificial Sequence: Synthetic gluten; inner sequence and 3'  sequence
gtacggaacgaacgtaatggacgacgtattgactagtacatgaccacttga

SEQ ID NO: 42963 - DNA, 53 bp, Artificial Sequence; identical to SEQ ID NO: 2789
  Description of Artificial Sequence: Synthetic gluten; inner sequence and 3'  sequence

SEQ ID NO: 42964 - DNA, 53 bp, Artificial Sequence
  Description of Artificial Sequence: Synthetic gluten; inner sequence and 3'  sequence
cgactcgacccgaaagtaggcatgtggctattgactagtacatgaccacttga

SEQ ID NO: 42965 - DNA, 53 bp, Artificial Sequence
  Description of Artificial Sequence: Synthetic gluten; inner sequence and 3'  sequence
ggccgacgaggctgaaagtcatacgtgctattgactagtacatgaccacttga

SEQ ID NO: 42966 - DNA, 53 bp, Artificial Sequence
  Description of Artificial Sequence: Synthetic gluten; inner sequence and 3'  sequence
gcgtcagcggcagagggactgatcaggtcattgactagtacatgaccacttga

SEQ ID NO: 42967 - DNA, 53 bp, Artificial Sequence
  Description of Artificial Sequence: Synthetic gluten; inner sequence and 3'  sequence
atggcatgcgatgaccacgtactgggcaatttgactagtacatgaccacttga

SEQ ID NO: 42968 - DNA, 51 bp, Artificial Sequence; identical to SEQ ID NO: 2148
  Description of Artificial Sequence: Synthetic gluten; inner sequence and 3'  sequence

SEQ ID NO: 42969 - DNA, 53 bp, Artificial Sequence
  Description of Artificial Sequence: Synthetic gluten; inner sequence and 3'  sequence
cgagctcgccgagagccgaagacagtcacattgactagtacatgaccacttga

SEQ ID NO: 42970 - DNA, 53 bp, Artificial Sequence
  Description of Artificial Sequence: Synthetic gluten; inner sequence and 3'  sequence
ccgatcgacctacaaagagcctgtaatagcttgactagtacatgaccacttga

SEQ ID NO: 42971 - DNA, 53 bp, Artificial Sequence
  Description of Artificial Sequence: Synthetic gluten; inner sequence and 3'  sequence
ccgatcgagcctaatagtagagcatgttacttgactagtacatgaccacttga

SEQ ID NO: 42972 - DNA, 53 bp, Artificial Sequence; identical to SEQ ID NO: 2493
  Description of Artificial Sequence: Synthetic gluten; inner sequence and 3'  sequence

SEQ ID NO: 42973 - DNA, 53 bp, Artificial Sequence
  Description of Artificial Sequence: Synthetic gluten; inner sequence and 3'  sequence
cctgagccgaagatcacctgtcaagttagattgactagtacatgaccacttga

SEQ ID NO: 42974 - DNA, 53 bp, Artificial Sequence
  Description of Artificial Sequence: Synthetic gluten; inner sequence and 3'  sequence
catcatgtggccgaacagactagctgggcattgactagtacatgaccacttga

SEQ ID NO: 42975 - DNA, 53 bp, Artificial Sequence
  Description of Artificial Sequence: Synthetic gluten; inner sequence and 3'  sequence
ggccgaatctgaccgctatcatgggatggcttgactagtacatgaccacttga

SEQ ID NO: 42976 - DNA, 53 bp, Artificial Sequence
  Description of Artificial Sequence: Synthetic gluten; inner sequence and 3'  sequence
caacacacgaaggctagctattgactcacgttgactagtacatgaccacttga

SEQ ID NO: 42977 - DNA, 53 bp, Artificial Sequence
  Description of Artificial Sequence: Synthetic gluten; inner sequence and 3'  sequence
gtacgacgcggaccttcaagtaggcgtgcattgactagtacatgaccacttga

SEQ ID NO: 42978 - DNA, 53 bp, Artificial Sequence; identical to SEQ ID NO: 22744
  Description of Artificial Sequence: Synthetic gluten; inner sequence and 3'  sequence

SEQ ID NO: 42979 - DNA, 53 bp, Artificial Sequence
  Description of Artificial Sequence: Synthetic gluten; inner sequence and 3'  sequence
ccactcacatggacgtatctgagctatcgattgactagtacatgaccacttga

SEQ ID NO: 42980 - DNA, 53 bp, Artificial Sequence
  Description of Artificial Sequence: Synthetic gluten; inner sequence and 3'  sequence
ggtctgatcgaacctagagagtggcgtggattgactagtacatgaccacttga

SEQ ID NO: 42981 - DNA, 53 bp, Artificial Sequence; identical to SEQ ID NO: 2991
  Description of Artificial Sequence: Synthetic gluten; inner sequence and 3'  sequence

SEQ ID NO: 42982 - DNA, 53 bp, Artificial Sequence
  Description of Artificial Sequence: Synthetic gluten; inner sequence and 3'  sequence
cacctctgacctgagcatgtgcgctgacgattgactagtacatgaccacttga

SEQ ID NO: 42983 - DNA, 53 bp, Artificial Sequence
  Description of Artificial Sequence: Synthetic gluten; inner sequence and 3'  sequence
ggaacggagcggaactcattggatcttcgattgactagtacatgaccacttga

SEQ ID NO: 42984 - DNA, 53 bp, Artificial Sequence
  Description of Artificial Sequence: Synthetic gluten; inner sequence and 3'  sequence
ggccgccctggatgtgagcatgcatctagtttgactagtacatgaccacttga

SEQ ID NO: 42985 - DNA, 53 bp, Artificial Sequence
  Description of Artificial Sequence: Synthetic gluten; inner sequence and 3'  sequence
acttcgatgcacctgtctatgtcgactagtttgactagtacatgaccacttga

SEQ ID NO: 42986 - DNA, 53 bp, Artificial Sequence; identical to SEQ ID NO: 2044
  Description of Artificial Sequence: Synthetic gluten; inner sequence and 3'  sequence

SEQ ID NO: 42987 - DNA, 53 bp, Artificial Sequence
  Description of Artificial Sequence: Synthetic gluten; inner sequence and 3'  sequence
ccgagcgacactaagctcatgataggcattttgactagtacatgaccacttga

SEQ ID NO: 42988 - DNA, 53 bp, Artificial Sequence
  Description of Artificial Sequence: Synthetic gluten; inner sequence and 3'  sequence
cctgaacgcaccctaactaagaaacatggattgactagtacatgaccacttga

SEQ ID NO: 42989 - DNA, 53 bp, Artificial Sequence
  Description of Artificial Sequence: Synthetic gluten; inner sequence and 3'  sequence
ggtgctggcgaacgaccagacattgtgctattgactagtacatgaccacttga

SEQ ID NO: 42990 - DNA, 53 bp, Artificial Sequence
  Description of Artificial Sequence: Synthetic gluten; inner sequence and 3'  sequence
catgtacgcgatccccagcattaaggcatattgactagtacatgaccacttga

SEQ ID NO: 42991 - DNA, 53 bp, Artificial Sequence
  Description of Artificial Sequence: Synthetic gluten; inner sequence and 3'  sequence
tggactgagcttcactaaaggtgggacgtattgactagtacatgaccacttga

SEQ ID NO: 42992 - DNA, 53 bp, Artificial Sequence
  Description of Artificial Sequence: Synthetic gluten; inner sequence and 3'  sequence
tgtccgactcgaccatctggacaggcatacttgactagtacatgaccacttga

SEQ ID NO: 42993 - DNA, 53 bp, Artificial Sequence
  Description of Artificial Sequence: Synthetic gluten; inner sequence and 3'  sequence
gacgaactcgaaccgaagcaaggccggtcattgactagtacatgaccacttga

SEQ ID NO: 42994 - DNA, 53 bp, Artificial Sequence
  Description of Artificial Sequence: Synthetic gluten; inner sequence and 3'  sequence
tgcctgatcgaacctagagagtggcgtggattgactagtacatgaccacttga

SEQ ID NO: 42995 - DNA, 53 bp, Artificial Sequence
  Description of Artificial Sequence: Synthetic gluten; inner sequence and 3'  sequence
tcgtaccgatcataggccggctagttcatattgactagtacatgaccacttga

SEQ ID NO: 42996 - DNA, 53 bp, Artificial Sequence
  Description of Artificial Sequence: Synthetic gluten; inner sequence and 3'  sequence
ccgacgagtccctacaagctgcgtgtcatattgactagtacatgaccacttga

SEQ ID NO: 42997 - DNA, 53 bp, Artificial Sequence
  Description of Artificial Sequence: Synthetic gluten; inner sequence and 3'  sequence
ccgatagaccagctactaactagcagcagattgactagtacatgaccacttga

SEQ ID NO: 42998 - DNA, 53 bp, Artificial Sequence
  Description of Artificial Sequence: Synthetic gluten; inner sequence and 3'  sequence
cgcgcgaggttcctaacatcattcgcgagtttgactagtacatgaccacttga

SEQ ID NO: 42999 - DNA, 53 bp, Artificial Sequence
  Description of Artificial Sequence: Synthetic gluten; inner sequence and 3'  sequence
ggcattcgatgaccgaccgtacgagagtcattgactagtacatgaccacttga

SEQ ID NO: 43000 - DNA, 53 bp, Artificial Sequence; identical to SEQ ID NO: 38966
  Description of Artificial Sequence: Synthetic gluten; inner sequence and 3'  sequence

SEQ ID NO: 43001 - DNA, 53 bp, Artificial Sequence
  Description of Artificial Sequence: Synthetic gluten; inner sequence and 3'  sequence
gtccgacatgcccctcaatgtggacgtggattgactagtacatgaccacttga

SEQ ID NO: 43002 - DNA, 53 bp, Artificial Sequence
  Description of Artificial Sequence: Synthetic gluten; inner sequence and 3'  sequence
catgactcaccgggaacggccagtttcatattgactagtacatgaccacttga

SEQ ID NO: 43003 - DNA, 76 bp, Artificial Sequence; identical to SEQ ID NO: 3024
  Description of Artificial Sequence: Synthetic gluten; 5' sequence + inner sequence + 3'  sequence

SEQ ID NO: 43004 - DNA, 76 bp, Artificial Sequence; identical to SEQ ID NO: 3034
  Description of Artificial Sequence: Synthetic gluten; 5' sequence + inner sequence + 3'  sequence

SEQ ID NO: 43005 - DNA, 76 bp, Artificial Sequence; identical to SEQ ID NO: 3040
  Description of Artificial Sequence: Synthetic gluten; 5' sequence + inner sequence + 3'  sequence

SEQ ID NO: 43006 - DNA, 76 bp, Artificial Sequence; identical to SEQ ID NO: 3017
  Description of Artificial Sequence: Synthetic gluten; 5' sequence + inner sequence + 3'  sequence

SEQ ID NO: 43007 - DNA, 76 bp, Artificial Sequence; identical to SEQ ID NO: 3464
  Description of Artificial Sequence: Synthetic gluten; 5' sequence + inner sequence + 3'  sequence

SEQ ID NO: 43008 - DNA, 76 bp, Artificial Sequence; identical to SEQ ID NO: 3039
  Description of Artificial Sequence: Synthetic gluten; 5' sequence + inner sequence + 3'  sequence

SEQ ID NO: 43009 - DNA, 76 bp, Artificial Sequence; identical to SEQ ID NO: 3008
  Description of Artificial Sequence: Synthetic gluten; 5' sequence + inner sequence + 3'  sequence

SEQ ID NO: 43010 - DNA, 76 bp, Artificial Sequence; identical to SEQ ID NO: 3006
  Description of Artificial Sequence: Synthetic gluten; 5' sequence + inner sequence + 3'  sequence

SEQ ID NO: 43011 - DNA, 76 bp, Artificial Sequence; identical to SEQ ID NO: 3631
  Description of Artificial Sequence: Synthetic gluten; 5' sequence + inner sequence + 3'  sequence

SEQ ID NO: 43012 - DNA, 76 bp, Artificial Sequence; identical to SEQ ID NO: 3019
  Description of Artificial Sequence: Synthetic gluten; 5' sequence + inner sequence + 3'  sequence

SEQ ID NO: 43013 - DNA, 76 bp, Artificial Sequence; identical to SEQ ID NO: 3010
  Description of Artificial Sequence: Synthetic gluten; 5' sequence + inner sequence + 3'  sequence

SEQ ID NO: 43014 - DNA, 76 bp, Artificial Sequence; identical to SEQ ID NO: 3052
  Description of Artificial Sequence: Synthetic gluten; 5' sequence + inner sequence + 3'  sequence

SEQ ID NO: 43015 - DNA, 76 bp, Artificial Sequence; identical to SEQ ID NO: 3074
  Description of Artificial Sequence: Synthetic gluten; 5' sequence + inner sequence + 3'  sequence

SEQ ID NO: 43016 - DNA, 76 bp, Artificial Sequence; identical to SEQ ID NO: 3094
  Description of Artificial Sequence: Synthetic gluten; 5' sequence + inner sequence + 3'  sequence

SEQ ID NO: 43017 - DNA, 76 bp, Artificial Sequence; identical to SEQ ID NO: 3139
  Description of Artificial Sequence: Synthetic gluten; 5' sequence + inner sequence + 3'  sequence

SEQ ID NO: 43018 - DNA, 76 bp, Artificial Sequence; identical to SEQ ID NO: 3060
  Description of Artificial Sequence: Synthetic gluten; 5' sequence + inner sequence + 3'  sequence

SEQ ID NO: 43019 - DNA, 76 bp, Artificial Sequence; identical to SEQ ID NO: 3116
  Description of Artificial Sequence: Synthetic gluten; 5' sequence + inner sequence + 3'  sequence

SEQ ID NO: 43020 - DNA, 76 bp, Artificial Sequence; identical to SEQ ID NO: 3273
  Description of Artificial Sequence: Synthetic gluten; 5' sequence + inner sequence + 3'  sequence

SEQ ID NO: 43021 - DNA, 76 bp, Artificial Sequence; identical to SEQ ID NO: 3022
  Description of Artificial Sequence: Synthetic gluten; 5' sequence + inner sequence + 3'  sequence

SEQ ID NO: 43022 - DNA, 76 bp, Artificial Sequence; identical to SEQ ID NO: 3012
  Description of Artificial Sequence: Synthetic gluten; 5' sequence + inner sequence + 3'  sequence

SEQ ID NO: 43023 - DNA, 76 bp, Artificial Sequence; identical to SEQ ID NO: 3027
  Description of Artificial Sequence: Synthetic gluten; 5' sequence + inner sequence + 3'  sequence

SEQ ID NO: 43024 - DNA, 76 bp, Artificial Sequence; identical to SEQ ID NO: 3053
  Description of Artificial Sequence: Synthetic gluten; 5' sequence + inner sequence + 3'  sequence

SEQ ID NO: 43025 - DNA, 76 bp, Artificial Sequence; identical to SEQ ID NO: 3047
  Description of Artificial Sequence: Synthetic gluten; 5' sequence + inner sequence + 3'  sequence

SEQ ID NO: 43026 - DNA, 76 bp, Artificial Sequence; identical to SEQ ID NO: 3037
  Description of Artificial Sequence: Synthetic gluten; 5' sequence + inner sequence + 3'  sequence

SEQ ID NO: 43027 - DNA, 76 bp, Artificial Sequence
  Description of Artificial Sequence: Synthetic gluten; 5' sequence + inner sequence + 3'  sequence
tagggaagagaaggacatatgatcatgtgcgaaccgagcttgtacaaggcatattgactagtacatgaccacttga

SEQ ID NO: 43028 - DNA, 76 bp, Artificial Sequence; identical to SEQ ID NO: 3059
  Description of Artificial Sequence: Synthetic gluten; 5' sequence + inner sequence + 3'  sequence

SEQ ID NO: 43029 - DNA, 76 bp, Artificial Sequence; identical to SEQ ID NO: 3032
  Description of Artificial Sequence: Synthetic gluten; 5' sequence + inner sequence + 3'  sequence

SEQ ID NO: 43030 - DNA, 76 bp, Artificial Sequence; identical to SEQ ID NO: 3058
  Description of Artificial Sequence: Synthetic gluten; 5' sequence + inner sequence + 3'  sequence

SEQ ID NO: 43031 - DNA, 76 bp, Artificial Sequence; identical to SEQ ID NO: 7874
  Description of Artificial Sequence: Synthetic gluten; 5' sequence + inner sequence + 3'  sequence

SEQ ID NO: 43032 - DNA, 76 bp, Artificial Sequence; identical to SEQ ID NO: 3308
  Description of Artificial Sequence: Synthetic gluten; 5' sequence + inner sequence + 3'  sequence

SEQ ID NO: 43033 - DNA, 76 bp, Artificial Sequence; identical to SEQ ID NO: 3383
  Description of Artificial Sequence: Synthetic gluten; 5' sequence + inner sequence + 3'  sequence

SEQ ID NO: 43034 - DNA, 76 bp, Artificial Sequence; identical to SEQ ID NO: 3377
  Description of Artificial Sequence: Synthetic gluten; 5' sequence + inner sequence + 3'  sequence

SEQ ID NO: 43035 - DNA, 76 bp, Artificial Sequence; identical to SEQ ID NO: 3082
  Description of Artificial Sequence: Synthetic gluten; 5' sequence + inner sequence + 3'  sequence

SEQ ID NO: 43036 - DNA, 76 bp, Artificial Sequence; identical to SEQ ID NO: 3238
  Description of Artificial Sequence: Synthetic gluten; 5' sequence + inner sequence + 3'  sequence

SEQ ID NO: 43037 - DNA, 76 bp, Artificial Sequence; identical to SEQ ID NO: 3055
  Description of Artificial Sequence: Synthetic gluten; 5' sequence + inner sequence + 3'  sequence

SEQ ID NO: 43038 - DNA, 75 bp, Artificial Sequence; identical to SEQ ID NO: 3193
  Description of Artificial Sequence: Synthetic gluten; 5' sequence + inner sequence + 3'  sequence

SEQ ID NO: 43039 - DNA, 76 bp, Artificial Sequence; identical to SEQ ID NO: 3003
  Description of Artificial Sequence: Synthetic gluten; 5' sequence + inner sequence + 3'  sequence

SEQ ID NO: 43040 - DNA, 76 bp, Artificial Sequence; identical to SEQ ID NO: 3128
  Description of Artificial Sequence: Synthetic gluten; 5' sequence + inner sequence + 3'  sequence

SEQ ID NO: 43041 - DNA, 76 bp, Artificial Sequence; identical to SEQ ID NO: 7513
  Description of Artificial Sequence: Synthetic gluten; 5' sequence + inner sequence + 3'  sequence

SEQ ID NO: 43042 - DNA, 76 bp, Artificial Sequence; identical to SEQ ID NO: 7814
  Description of Artificial Sequence: Synthetic gluten; 5' sequence + inner sequence + 3'  sequence

SEQ ID NO: 43043 - DNA, 76 bp, Artificial Sequence; identical to SEQ ID NO: 3023
  Description of Artificial Sequence: Synthetic gluten; 5' sequence + inner sequence + 3'  sequence

SEQ ID NO: 43044 - DNA, 73 bp, Artificial Sequence; identical to SEQ ID NO: 27993
  Description of Artificial Sequence: Synthetic gluten; 5' sequence + inner sequence + 3'  sequence

SEQ ID NO: 43045 - DNA, 76 bp, Artificial Sequence; identical to SEQ ID NO: 3645
  Description of Artificial Sequence: Synthetic gluten; 5' sequence + inner sequence + 3'  sequence

SEQ ID NO: 43046 - DNA, 76 bp, Artificial Sequence; identical to SEQ ID NO: 3005
  Description of Artificial Sequence: Synthetic gluten; 5' sequence + inner sequence + 3'  sequence

SEQ ID NO: 43047 - DNA, 76 bp, Artificial Sequence; identical to SEQ ID NO: 3438
  Description of Artificial Sequence: Synthetic gluten; 5' sequence + inner sequence + 3'  sequence

SEQ ID NO: 43048 - DNA, 71 bp, Artificial Sequence; identical to SEQ ID NO: 3427
  Description of Artificial Sequence: Synthetic gluten; 5' sequence + inner sequence + 3'  sequence

SEQ ID NO: 43049 - DNA, 76 bp, Artificial Sequence; identical to SEQ ID NO: 31427
  Description of Artificial Sequence: Synthetic gluten; 5' sequence + inner sequence + 3'  sequence

SEQ ID NO: 43050 - DNA, 76 bp, Artificial Sequence; identical to SEQ ID NO: 3015
  Description of Artificial Sequence: Synthetic gluten; 5' sequence + inner sequence + 3'  sequence

SEQ ID NO: 43051 - DNA, 76 bp, Artificial Sequence; identical to SEQ ID NO: 3029
  Description of Artificial Sequence: Synthetic gluten; 5' sequence + inner sequence + 3'  sequence

SEQ ID NO: 43052 - DNA, 76 bp, Artificial Sequence
  Description of Artificial Sequence: Synthetic gluten; 5' sequence + inner sequence + 3'  sequence
tagggaagagaaggacatatgatgtcatgcgatggaagagaatgtgcattgtcttgactagtacatgaccacttga

SEQ ID NO: 43053 - DNA, 76 bp, Artificial Sequence; identical to SEQ ID NO: 3777
  Description of Artificial Sequence: Synthetic gluten; 5' sequence + inner sequence + 3'  sequence

SEQ ID NO: 43054 - DNA, 76 bp, Artificial Sequence; identical to SEQ ID NO: 3142
  Description of Artificial Sequence: Synthetic gluten; 5' sequence + inner sequence + 3'  sequence

SEQ ID NO: 43055 - DNA, 76 bp, Artificial Sequence
  Description of Artificial Sequence: Synthetic gluten; 5' sequence + inner sequence + 3'  sequence
tagggaagagaaggacatatgatgtcatgcgatctcactatcaagtgttggcattgactagtacatgaccacttga

SEQ ID NO: 43056 - DNA, 76 bp, Artificial Sequence; identical to SEQ ID NO: 3147
  Description of Artificial Sequence: Synthetic gluten; 5' sequence + inner sequence + 3'  sequence

SEQ ID NO: 43057 - DNA, 76 bp, Artificial Sequence; identical to SEQ ID NO: 3218
  Description of Artificial Sequence: Synthetic gluten; 5' sequence + inner sequence + 3'  sequence

SEQ ID NO: 43058 - DNA, 76 bp, Artificial Sequence; identical to SEQ ID NO: 3328
  Description of Artificial Sequence: Synthetic gluten; 5' sequence + inner sequence + 3'  sequence

SEQ ID NO: 43059 - DNA, 76 bp, Artificial Sequence; identical to SEQ ID NO: 3133
  Description of Artificial Sequence: Synthetic gluten; 5' sequence + inner sequence + 3'  sequence

SEQ ID NO: 43060 - DNA, 76 bp, Artificial Sequence
  Description of Artificial Sequence: Synthetic gluten; 5' sequence + inner sequence + 3'  sequence
tagggaagagaaggacatatgatggactgcgatggatggggcaatacgacgttttgactagtacatgaccacttga

SEQ ID NO: 43061 - DNA, 76 bp, Artificial Sequence; identical to SEQ ID NO: 3009
  Description of Artificial Sequence: Synthetic gluten; 5' sequence + inner sequence + 3'  sequence

SEQ ID NO: 43062 - DNA, 76 bp, Artificial Sequence; identical to SEQ ID NO: 7860
  Description of Artificial Sequence: Synthetic gluten; 5' sequence + inner sequence + 3'  sequence

SEQ ID NO: 43063 - DNA, 75 bp, Artificial Sequence; identical to SEQ ID NO: 3070
  Description of Artificial Sequence: Synthetic gluten; 5' sequence + inner sequence + 3'  sequence

SEQ ID NO: 43064 - DNA, 76 bp, Artificial Sequence; identical to SEQ ID NO: 3968
  Description of Artificial Sequence: Synthetic gluten; 5' sequence + inner sequence + 3'  sequence

SEQ ID NO: 43065 - DNA, 76 bp, Artificial Sequence
  Description of Artificial Sequence: Synthetic gluten; 5' sequence + inner sequence + 3'  sequence
tagggaagagaaggacatatgatgacgtcgatgaaccttcgagtgagcatgtattgactagtacatgaccacttga

SEQ ID NO: 43066 - DNA, 76 bp, Artificial Sequence; identical to SEQ ID NO: 3011
  Description of Artificial Sequence: Synthetic gluten; 5' sequence + inner sequence + 3'  sequence

SEQ ID NO: 43067 - DNA, 76 bp, Artificial Sequence
  Description of Artificial Sequence: Synthetic gluten; 5' sequence + inner sequence + 3'  sequence
tagggaagagaaggacatatgatccgacgaagataaggcagagaggcatcctattgactagtacatgaccacttga

SEQ ID NO: 43068 - DNA, 76 bp, Artificial Sequence; identical to SEQ ID NO: 15799
  Description of Artificial Sequence: Synthetic gluten; 5' sequence + inner sequence + 3'  sequence

SEQ ID NO: 43069 - DNA, 76 bp, Artificial Sequence; identical to SEQ ID NO: 3950
  Description of Artificial Sequence: Synthetic gluten; 5' sequence + inner sequence + 3'  sequence

SEQ ID NO: 43070 - DNA, 76 bp, Artificial Sequence; identical to SEQ ID NO: 3013
  Description of Artificial Sequence: Synthetic gluten; 5' sequence + inner sequence + 3'  sequence

SEQ ID NO: 43071 - DNA, 76 bp, Artificial Sequence; identical to SEQ ID NO: 3080
  Description of Artificial Sequence: Synthetic gluten; 5' sequence + inner sequence + 3'  sequence

SEQ ID NO: 43072 - DNA, 76 bp, Artificial Sequence; identical to SEQ ID NO: 31947
  Description of Artificial Sequence: Synthetic gluten; 5' sequence + inner sequence + 3'  sequence

SEQ ID NO: 43073 - DNA, 76 bp, Artificial Sequence
  Description of Artificial Sequence: Synthetic gluten; 5' sequence + inner sequence + 3'  sequence
tagggaagagaaggacatatgatggacaatgcgaaccgttcaagtcgaatggattgactagtacatgaccacttga

SEQ ID NO: 43074 - DNA, 76 bp, Artificial Sequence; identical to SEQ ID NO: 3715
  Description of Artificial Sequence: Synthetic gluten; 5' sequence + inner sequence + 3'  sequence

SEQ ID NO: 43075 - DNA, 76 bp, Artificial Sequence; identical to SEQ ID NO: 3066
  Description of Artificial Sequence: Synthetic gluten; 5' sequence + inner sequence + 3'  sequence

SEQ ID NO: 43076 - DNA, 76 bp, Artificial Sequence; identical to SEQ ID NO: 3253
  Description of Artificial Sequence: Synthetic gluten; 5' sequence + inner sequence + 3'  sequence

SEQ ID NO: 43077 - DNA, 76 bp, Artificial Sequence; identical to SEQ ID NO: 31989
  Description of Artificial Sequence: Synthetic gluten; 5' sequence + inner sequence + 3'  sequence

SEQ ID NO: 43078 - DNA, 76 bp, Artificial Sequence; identical to SEQ ID NO: 11988
  Description of Artificial Sequence: Synthetic gluten; 5' sequence + inner sequence + 3'  sequence

SEQ ID NO: 43079 - DNA, 76 bp, Artificial Sequence; identical to SEQ ID NO: 3741
  Description of Artificial Sequence: Synthetic gluten; 5' sequence + inner sequence + 3'  sequence

SEQ ID NO: 43080 - DNA, 76 bp, Artificial Sequence; identical to SEQ ID NO: 3028
  Description of Artificial Sequence: Synthetic gluten; 5' sequence + inner sequence + 3'  sequence

SEQ ID NO: 43081 - DNA, 76 bp, Artificial Sequence
  Description of Artificial Sequence: Synthetic gluten; 5' sequence + inner sequence + 3'  sequence
tagggaagagaaggacatatgatacattggacggaacgacccttcaagcgggcttgactagtacatgaccacttga

SEQ ID NO: 43082 - DNA, 76 bp, Artificial Sequence
  Description of Artificial Sequence: Synthetic gluten; 5' sequence + inner sequence + 3'  sequence
tagggaagagaaggacatatgataggcacgagctccagaaccttcagtcagcattgactagtacatgaccacttga

SEQ ID NO: 43083 - DNA, 76 bp, Artificial Sequence; identical to SEQ ID NO: 3191
  Description of Artificial Sequence: Synthetic gluten; 5' sequence + inner sequence + 3'  sequence

SEQ ID NO: 43084 - DNA, 76 bp, Artificial Sequence; identical to SEQ ID NO: 3016
  Description of Artificial Sequence: Synthetic gluten; 5' sequence + inner sequence + 3'  sequence

SEQ ID NO: 43085 - DNA, 76 bp, Artificial Sequence; identical to SEQ ID NO: 11991
  Description of Artificial Sequence: Synthetic gluten; 5' sequence + inner sequence + 3'  sequence

SEQ ID NO: 43086 - DNA, 76 bp, Artificial Sequence
  Description of Artificial Sequence: Synthetic gluten; 5' sequence + inner sequence + 3'  sequence
tagggaagagaaggacatatgatggccgtcgatgagcgcgcatgtatcgtgtcttgactagtacatgaccacttga

SEQ ID NO: 43087 - DNA, 76 bp, Artificial Sequence
  Description of Artificial Sequence: Synthetic gluten; 5' sequence + inner sequence + 3'  sequence
tagggaagagaaggacatatgatggcatgctcgaccctcatgtgggacaggtattgactagtacatgaccacttga

SEQ ID NO: 43088 - DNA, 76 bp, Artificial Sequence; identical to SEQ ID NO: 7981
  Description of Artificial Sequence: Synthetic gluten; 5' sequence + inner sequence + 3'  sequence

SEQ ID NO: 43089 - DNA, 76 bp, Artificial Sequence; identical to SEQ ID NO: 3041
  Description of Artificial Sequence: Synthetic gluten; 5' sequence + inner sequence + 3'  sequence

SEQ ID NO: 43090 - DNA, 76 bp, Artificial Sequence
  Description of Artificial Sequence: Synthetic gluten; 5' sequence + inner sequence + 3'  sequence
tagggaagagaaggacatatgatcatgtgcaacgtatagccgaaatgggcatattgactagtacatgaccacttga

SEQ ID NO: 43091 - DNA, 76 bp, Artificial Sequence; identical to SEQ ID NO: 3316
  Description of Artificial Sequence: Synthetic gluten; 5' sequence + inner sequence + 3'  sequence

SEQ ID NO: 43092 - DNA, 76 bp, Artificial Sequence; identical to SEQ ID NO: 3692
  Description of Artificial Sequence: Synthetic gluten; 5' sequence + inner sequence + 3'  sequence

SEQ ID NO: 43093 - DNA, 76 bp, Artificial Sequence; identical to SEQ ID NO: 7644
  Description of Artificial Sequence: Synthetic gluten; 5' sequence + inner sequence + 3'  sequence

SEQ ID NO: 43094 - DNA, 76 bp, Artificial Sequence
  Description of Artificial Sequence: Synthetic gluten; 5' sequence + inner sequence + 3'  sequence
tagggaagagaaggacatatgatcatatggacagcgctacactcaagtcgtcattgactagtacatgaccacttga

SEQ ID NO: 43095 - DNA, 76 bp, Artificial Sequence; identical to SEQ ID NO: 3816
  Description of Artificial Sequence: Synthetic gluten; 5' sequence + inner sequence + 3'  sequence

SEQ ID NO: 43096 - DNA, 76 bp, Artificial Sequence
  Description of Artificial Sequence: Synthetic gluten; 5' sequence + inner sequence + 3'  sequence
tagggaagagaaggacatatgatggacaaacgcacctatcaagtgagatggcattgactagtacatgaccacttga

SEQ ID NO: 43097 - DNA, 76 bp, Artificial Sequence; identical to SEQ ID NO: 3702
  Description of Artificial Sequence: Synthetic gluten; 5' sequence + inner sequence + 3'  sequence

SEQ ID NO: 43098 - DNA, 76 bp, Artificial Sequence; identical to SEQ ID NO: 3889
  Description of Artificial Sequence: Synthetic gluten; 5' sequence + inner sequence + 3'  sequence

SEQ ID NO: 43099 - DNA, 76 bp, Artificial Sequence
  Description of Artificial Sequence: Synthetic gluten; 5' sequence + inner sequence + 3'  sequence
tagggaagagaaggacatatgatgtactgcacgaccgatagagcatggactgtttgactagtacatgaccacttga

SEQ ID NO: 43100 - DNA, 76 bp, Artificial Sequence
  Description of Artificial Sequence: Synthetic gluten; 5' sequence + inner sequence + 3'  sequence
tagggaagagaaggacatatgatgtaccaacgcacccttcaagatgtcatggattgactagtacatgaccacttga

SEQ ID NO: 43101 - DNA, 76 bp, Artificial Sequence
  Description of Artificial Sequence: Synthetic gluten; 5' sequence + inner sequence + 3'  sequence
tagggaagagaaggacatatgatggacagcgatggatgtggaaatgcgacgtcttgactagtacatgaccacttga

SEQ ID NO: 43102 - DNA, 76 bp, Artificial Sequence
  Description of Artificial Sequence: Synthetic gluten; 5' sequence + inner sequence + 3'  sequence
tagggaagagaaggacatatgatggcatgcgattccctgtcaacgcttgatcattgactagtacatgaccacttga

SEQ ID NO: 43103 - DNA, 76 bp, Artificial Sequence
  Description of Artificial Sequence: Synthetic gluten; 5' sequence + inner sequence + 3'  sequence
tagggaagagaaggacatatgatggcctgatcgaacctagagagaggcgtggattgactagtacatgaccacttga

SEQ ID NO: 43104 - DNA, 76 bp, Artificial Sequence; identical to SEQ ID NO: 7234
  Description of Artificial Sequence: Synthetic gluten; 5' sequence + inner sequence + 3'  sequence

SEQ ID NO: 43105 - DNA, 76 bp, Artificial Sequence
  Description of Artificial Sequence: Synthetic gluten; 5' sequence + inner sequence + 3'  sequence
tagggaagagaaggacatatgatccatcatggcatgatattcactggcgtgtcttgactagtacatgaccacttga

SEQ ID NO: 43106 - DNA, 76 bp, Artificial Sequence; identical to SEQ ID NO: 3045
  Description of Artificial Sequence: Synthetic gluten; 5' sequence + inner sequence + 3'  sequence

SEQ ID NO: 43107 - DNA, 76 bp, Artificial Sequence; identical to SEQ ID NO: 31662
  Description of Artificial Sequence: Synthetic gluten; 5' sequence + inner sequence + 3'  sequence

SEQ ID NO: 43108 - DNA, 76 bp, Artificial Sequence; identical to SEQ ID NO: 3265
  Description of Artificial Sequence: Synthetic gluten; 5' sequence + inner sequence + 3'  sequence

SEQ ID NO: 43109 - DNA, 76 bp, Artificial Sequence; identical to SEQ ID NO: 3203
  Description of Artificial Sequence: Synthetic gluten; 5' sequence + inner sequence + 3'  sequence

SEQ ID NO: 43110 - DNA, 76 bp, Artificial Sequence; identical to SEQ ID NO: 3764
  Description of Artificial Sequence: Synthetic gluten; 5' sequence + inner sequence + 3'  sequence

SEQ ID NO: 43111 - DNA, 76 bp, Artificial Sequence
  Description of Artificial Sequence: Synthetic gluten; 5' sequence + inner sequence + 3'  sequence
tagggaagagaaggacatatgatcgatcacgagaagatgaactgcgatggatgttgactagtacatgaccacttga

SEQ ID NO: 43112 - DNA, 76 bp, Artificial Sequence; identical to SEQ ID NO: 3007
  Description of Artificial Sequence: Synthetic gluten; 5' sequence + inner sequence + 3'  sequence

SEQ ID NO: 43113 - DNA, 76 bp, Artificial Sequence
  Description of Artificial Sequence: Synthetic gluten; 5' sequence + inner sequence + 3'  sequence
tagggaagagaaggacatatgatgacgacgcgaacctatcaagggctcatggattgactagtacatgaccacttga

SEQ ID NO: 43114 - DNA, 76 bp, Artificial Sequence; identical to SEQ ID NO: 3099
  Description of Artificial Sequence: Synthetic gluten; 5' sequence + inner sequence + 3'  sequence

SEQ ID NO: 43115 - DNA, 76 bp, Artificial Sequence
  Description of Artificial Sequence: Synthetic gluten; 5' sequence + inner sequence + 3'  sequence
tagggaagagaaggacatatgatgtcatgcgttgacctaccagtggccaggtattgactagtacatgaccacttga

SEQ ID NO: 43116 - DNA, 76 bp, Artificial Sequence
  Description of Artificial Sequence: Synthetic gluten; 5' sequence + inner sequence + 3'  sequence
tagggaagagaaggacatatgattggccgacctattgcctaacaagtgtggcattgactagtacatgaccacttga

SEQ ID NO: 43117 - DNA, 76 bp, Artificial Sequence
  Description of Artificial Sequence: Synthetic gluten; 5' sequence + inner sequence + 3'  sequence
tagggaagagaaggacatatgattggccgacgagtcactatcaagttcgggcattgactagtacatgaccacttga

SEQ ID NO: 43118 - DNA, 76 bp, Artificial Sequence
  Description of Artificial Sequence: Synthetic gluten; 5' sequence + inner sequence + 3'  sequence
tagggaagagaaggacatatgatatgcacttcgatggatggtcagccacgacgttgactagtacatgaccacttga

SEQ ID NO: 43119 - DNA, 76 bp, Artificial Sequence; identical to SEQ ID NO: 7535
  Description of Artificial Sequence: Synthetic gluten; 5' sequence + inner sequence + 3'  sequence

SEQ ID NO: 43120 - DNA, 76 bp, Artificial Sequence
  Description of Artificial Sequence: Synthetic gluten; 5' sequence + inner sequence + 3'  sequence
tagggaagagaaggacatatgatggcctgatcgaacctagagagcggcgtggattgactagtacatgaccacttga

SEQ ID NO: 43121 - DNA, 76 bp, Artificial Sequence
  Description of Artificial Sequence: Synthetic gluten; 5' sequence + inner sequence + 3'  sequence
tagggaagagaaggacatatgatacatgtcacgaacgaacctacatgtggacattgactagtacatgaccacttga

SEQ ID NO: 43122 - DNA, 76 bp, Artificial Sequence
  Description of Artificial Sequence: Synthetic gluten; 5' sequence + inner sequence + 3'  sequence
tagggaagagaaggacatatgatcatgtacacagtgcagcaccatgtggcatattgactagtacatgaccacttga

SEQ ID NO: 43123 - DNA, 76 bp, Artificial Sequence; identical to SEQ ID NO: 3122
  Description of Artificial Sequence: Synthetic gluten; 5' sequence + inner sequence + 3'  sequence

SEQ ID NO: 43124 - DNA, 76 bp, Artificial Sequence; identical to SEQ ID NO: 3145
  Description of Artificial Sequence: Synthetic gluten; 5' sequence + inner sequence + 3'  sequence

SEQ ID NO: 43125 - DNA, 76 bp, Artificial Sequence; identical to SEQ ID NO: 3911
  Description of Artificial Sequence: Synthetic gluten; 5' sequence + inner sequence + 3'  sequence

SEQ ID NO: 43126 - DNA, 76 bp, Artificial Sequence; identical to SEQ ID NO: 3049
  Description of Artificial Sequence: Synthetic gluten; 5' sequence + inner sequence + 3'  sequence

SEQ ID NO: 43127 - DNA, 76 bp, Artificial Sequence; identical to SEQ ID NO: 7889
  Description of Artificial Sequence: Synthetic gluten; 5' sequence + inner sequence + 3'  sequence

SEQ ID NO: 43128 - DNA, 76 bp, Artificial Sequence; identical to SEQ ID NO: 3311
  Description of Artificial Sequence: Synthetic gluten; 5' sequence + inner sequence + 3'  sequence

SEQ ID NO: 43129 - DNA, 76 bp, Artificial Sequence
  Description of Artificial Sequence: Synthetic gluten; 5' sequence + inner sequence + 3'  sequence
tagggaagagaaggacatatgatggacagagcgaacccttcaagtgtgctgtattgactagtacatgaccacttga

SEQ ID NO: 43130 - DNA, 76 bp, Artificial Sequence
  Description of Artificial Sequence: Synthetic gluten; 5' sequence + inner sequence + 3'  sequence
tagggaagagaaggacatatgatgaccgaacggaacttcatgtgcgatatgtattgactagtacatgaccacttga

SEQ ID NO: 43131 - DNA, 76 bp, Artificial Sequence
  Description of Artificial Sequence: Synthetic gluten; 5' sequence + inner sequence + 3'  sequence
tagggaagagaaggacatatgatggacaaacgcagcctacatgtggaagtgtattgactagtacatgaccacttga

SEQ ID NO: 43132 - DNA, 76 bp, Artificial Sequence
  Description of Artificial Sequence: Synthetic gluten; 5' sequence + inner sequence + 3'  sequence
tagggaagagaaggacatatgatgtcatgcgatggattgggcattgcgtaggcttgactagtacatgaccacttga

SEQ ID NO: 43133 - DNA, 76 bp, Artificial Sequence
  Description of Artificial Sequence: Synthetic gluten; 5' sequence + inner sequence + 3'  sequence
tagggaagagaaggacatatgatcatgtacacatggacagcgtgaacgtcatattgactagtacatgaccacttga

SEQ ID NO: 43134 - DNA, 76 bp, Artificial Sequence; identical to SEQ ID NO: 3264
  Description of Artificial Sequence: Synthetic gluten; 5' sequence + inner sequence + 3'  sequence

SEQ ID NO: 43135 - DNA, 76 bp, Artificial Sequence; identical to SEQ ID NO: 7254
  Description of Artificial Sequence: Synthetic gluten; 5' sequence + inner sequence + 3'  sequence

SEQ ID NO: 43136 - DNA, 76 bp, Artificial Sequence; identical to SEQ ID NO: 3031
  Description of Artificial Sequence: Synthetic gluten; 5' sequence + inner sequence + 3'  sequence

SEQ ID NO: 43137 - DNA, 76 bp, Artificial Sequence
  Description of Artificial Sequence: Synthetic gluten; 5' sequence + inner sequence + 3'  sequence
tagggaagagaaggacatatgatgacattcacgaacctacaactggacgtgtattgactagtacatgaccacttga

SEQ ID NO: 43138 - DNA, 76 bp, Artificial Sequence
  Description of Artificial Sequence: Synthetic gluten; 5' sequence + inner sequence + 3'  sequence
tagggaagagaaggacatatgatcatgtgcggaaaggcgtcgaagaaggcatattgactagtacatgaccacttga

SEQ ID NO: 43139 - DNA, 76 bp, Artificial Sequence
  Description of Artificial Sequence: Synthetic gluten; 5' sequence + inner sequence + 3'  sequence
tagggaagagaaggacatatgatcatgtgcgaactagtatcgtttagagcatattgactagtacatgaccacttga

SEQ ID NO: 43140 - DNA, 76 bp, Artificial Sequence
  Description of Artificial Sequence: Synthetic gluten; 5' sequence + inner sequence + 3'  sequence
tagggaagagaaggacatatgatgacgtgaacgacctcaagggacatgcactattgactagtacatgaccacttga

SEQ ID NO: 43141 - DNA, 76 bp, Artificial Sequence
  Description of Artificial Sequence: Synthetic gluten; 5' sequence + inner sequence + 3'  sequence
tagggaagagaaggacatatgataatatggccgagacaagctacgagctagttttgactagtacatgaccacttga

SEQ ID NO: 43142 - DNA, 76 bp, Artificial Sequence
  Description of Artificial Sequence: Synthetic gluten; 5' sequence + inner sequence + 3'  sequence
tagggaagagaaggacatatgatcatgacgacaccgagcgtatacacgacatattgactagtacatgaccacttga

SEQ ID NO: 43143 - DNA, 76 bp, Artificial Sequence; identical to SEQ ID NO: 3703
  Description of Artificial Sequence: Synthetic gluten; 5' sequence + inner sequence + 3'  sequence

SEQ ID NO: 43144 - DNA, 76 bp, Artificial Sequence
  Description of Artificial Sequence: Synthetic gluten; 5' sequence + inner sequence + 3'  sequence
tagggaagagaaggacatatgatggccgacgatggaagtgagcttgcctagtcttgactagtacatgaccacttga

SEQ ID NO: 43145 - DNA, 76 bp, Artificial Sequence
  Description of Artificial Sequence: Synthetic gluten; 5' sequence + inner sequence + 3'  sequence
tagggaagagaaggacatatgatacgtcacgggaaacttgccggcattgtagcttgactagtacatgaccacttga

SEQ ID NO: 43146 - DNA, 76 bp, Artificial Sequence
  Description of Artificial Sequence: Synthetic gluten; 5' sequence + inner sequence + 3'  sequence
tagggaagagaaggacatatgattcatcacatgaacgcgttctgagctggtcattgactagtacatgaccacttga

SEQ ID NO: 43147 - DNA, 76 bp, Artificial Sequence
  Description of Artificial Sequence: Synthetic gluten; 5' sequence + inner sequence + 3'  sequence
tagggaagagaaggacatatgatgtaccgaacgtagcctaaagtgatcgtggattgactagtacatgaccacttga

SEQ ID NO: 43148 - DNA, 76 bp, Artificial Sequence; identical to SEQ ID NO: 3230
  Description of Artificial Sequence: Synthetic gluten; 5' sequence + inner sequence + 3'  sequence

SEQ ID NO: 43149 - DNA, 76 bp, Artificial Sequence; identical to SEQ ID NO: 3215
  Description of Artificial Sequence: Synthetic gluten; 5' sequence + inner sequence + 3'  sequence

SEQ ID NO: 43150 - DNA, 76 bp, Artificial Sequence
  Description of Artificial Sequence: Synthetic gluten; 5' sequence + inner sequence + 3'  sequence
tagggaagagaaggacatatgattggaacgcagaaaggtggatcggtcaacaattgactagtacatgaccacttga

SEQ ID NO: 43151 - DNA, 76 bp, Artificial Sequence; identical to SEQ ID NO: 3207
  Description of Artificial Sequence: Synthetic gluten; 5' sequence + inner sequence + 3'  sequence

SEQ ID NO: 43152 - DNA, 76 bp, Artificial Sequence
  Description of Artificial Sequence: Synthetic gluten; 5' sequence + inner sequence + 3'  sequence
tagggaagagaaggacatatgatggcatgcgatgagctcaagttggccttgtattgactagtacatgaccacttga

SEQ ID NO: 43153 - DNA, 76 bp, Artificial Sequence; identical to SEQ ID NO: 3014
  Description of Artificial Sequence: Synthetic gluten; 5' sequence + inner sequence + 3'  sequence

SEQ ID NO: 43154 - DNA, 76 bp, Artificial Sequence; identical to SEQ ID NO: 3025
  Description of Artificial Sequence: Synthetic gluten; 5' sequence + inner sequence + 3'  sequence

SEQ ID NO: 43155 - DNA, 76 bp, Artificial Sequence
  Description of Artificial Sequence: Synthetic gluten; 5' sequence + inner sequence + 3'  sequence
tagggaagagaaggacatatgatccgacgatgaccgtgagactcaagcggacattgactagtacatgaccacttga

SEQ ID NO: 43156 - DNA, 76 bp, Artificial Sequence; identical to SEQ ID NO: 7775
  Description of Artificial Sequence: Synthetic gluten; 5' sequence + inner sequence + 3'  sequence

SEQ ID NO: 43157 - DNA, 76 bp, Artificial Sequence; identical to SEQ ID NO: 3714
  Description of Artificial Sequence: Synthetic gluten; 5' sequence + inner sequence + 3'  sequence

SEQ ID NO: 43158 - DNA, 76 bp, Artificial Sequence; identical to SEQ ID NO: 3906
  Description of Artificial Sequence: Synthetic gluten; 5' sequence + inner sequence + 3'  sequence

SEQ ID NO: 43159 - DNA, 76 bp, Artificial Sequence
  Description of Artificial Sequence: Synthetic gluten; 5' sequence + inner sequence + 3'  sequence
tagggaagagaaggacatatgataacatggccgacgacaccgatcatgtgggattgactagtacatgaccacttga

SEQ ID NO: 43160 - DNA, 76 bp, Artificial Sequence; identical to SEQ ID NO: 3093
  Description of Artificial Sequence: Synthetic gluten; 5' sequence + inner sequence + 3'  sequence

SEQ ID NO: 43161 - DNA, 76 bp, Artificial Sequence; identical to SEQ ID NO: 3299
  Description of Artificial Sequence: Synthetic gluten; 5' sequence + inner sequence + 3'  sequence

SEQ ID NO: 43162 - DNA, 76 bp, Artificial Sequence; identical to SEQ ID NO: 3033
  Description of Artificial Sequence: Synthetic gluten; 5' sequence + inner sequence + 3'  sequence

SEQ ID NO: 43163 - DNA, 76 bp, Artificial Sequence
  Description of Artificial Sequence: Synthetic gluten; 5' sequence + inner sequence + 3'  sequence
tagggaagagaaggacatatgatcgaacgcaccgtaagaactggacagtcacattgactagtacatgaccacttga

SEQ ID NO: 43164 - DNA, 76 bp, Artificial Sequence
  Description of Artificial Sequence: Synthetic gluten; 5' sequence + inner sequence + 3'  sequence
tagggaagagaaggacatatgatcatgtacgcataaaggtgcagtcactcatattgactagtacatgaccacttga

SEQ ID NO: 43165 - DNA, 76 bp, Artificial Sequence; identical to SEQ ID NO: 39702
  Description of Artificial Sequence: Synthetic gluten; 5' sequence + inner sequence + 3'  sequence

SEQ ID NO: 43166 - DNA, 76 bp, Artificial Sequence; identical to SEQ ID NO: 39967
  Description of Artificial Sequence: Synthetic gluten; 5' sequence + inner sequence + 3'  sequence

SEQ ID NO: 43167 - DNA, 76 bp, Artificial Sequence; identical to SEQ ID NO: 11401
  Description of Artificial Sequence: Synthetic gluten; 5' sequence + inner sequence + 3'  sequence

SEQ ID NO: 43168 - DNA, 76 bp, Artificial Sequence; identical to SEQ ID NO: 3243
  Description of Artificial Sequence: Synthetic gluten; 5' sequence + inner sequence + 3'  sequence

SEQ ID NO: 43169 - DNA, 76 bp, Artificial Sequence; identical to SEQ ID NO: 3134
  Description of Artificial Sequence: Synthetic gluten; 5' sequence + inner sequence + 3'  sequence

SEQ ID NO: 43170 - DNA, 76 bp, Artificial Sequence
  Description of Artificial Sequence: Synthetic gluten; 5' sequence + inner sequence + 3'  sequence
tagggaagagaaggacatatgatccatcagatgcaaaacgacaattgggcattttgactagtacatgaccacttga

SEQ ID NO: 43171 - DNA, 76 bp, Artificial Sequence; identical to SEQ ID NO: 7451
  Description of Artificial Sequence: Synthetic gluten; 5' sequence + inner sequence + 3'  sequence

SEQ ID NO: 43172 - DNA, 76 bp, Artificial Sequence
  Description of Artificial Sequence: Synthetic gluten; 5' sequence + inner sequence + 3'  sequence
tagggaagagaaggacatatgatgtcacactctgaacgtcaatggtcgatggattgactagtacatgaccacttga

SEQ ID NO: 43173 - DNA, 76 bp, Artificial Sequence; identical to SEQ ID NO: 3811
  Description of Artificial Sequence: Synthetic gluten; 5' sequence + inner sequence + 3'  sequence

SEQ ID NO: 43174 - DNA, 76 bp, Artificial Sequence
  Description of Artificial Sequence: Synthetic gluten; 5' sequence + inner sequence + 3'  sequence
tagggaagagaaggacatatgatcatgtacgcaccacgtatgcaaatatcatattgactagtacatgaccacttga

SEQ ID NO: 43175 - DNA, 76 bp, Artificial Sequence
  Description of Artificial Sequence: Synthetic gluten; 5' sequence + inner sequence + 3'  sequence
tagggaagagaaggacatatgatggcctgatcgaacctagagagtggcgcggattgactagtacatgaccacttga

SEQ ID NO: 43176 - DNA, 76 bp, Artificial Sequence
  Description of Artificial Sequence: Synthetic gluten; 5' sequence + inner sequence + 3'  sequence
tagggaagagaaggacatatgatcggaacagagagccgaagatacagtgtcacttgactagtacatgaccacttga

SEQ ID NO: 43177 - DNA, 76 bp, Artificial Sequence; identical to SEQ ID NO: 31586
  Description of Artificial Sequence: Synthetic gluten; 5' sequence + inner sequence + 3'  sequence

SEQ ID NO: 43178 - DNA, 76 bp, Artificial Sequence; identical to SEQ ID NO: 7591
  Description of Artificial Sequence: Synthetic gluten; 5' sequence + inner sequence + 3'  sequence

SEQ ID NO: 43179 - DNA, 76 bp, Artificial Sequence
  Description of Artificial Sequence: Synthetic gluten; 5' sequence + inner sequence + 3'  sequence
tagggaagagaaggacatatgatgtacgcaatcgttacctagcaagctgggcattgactagtacatgaccacttga

SEQ ID NO: 43180 - DNA, 76 bp, Artificial Sequence
  Description of Artificial Sequence: Synthetic gluten; 5' sequence + inner sequence + 3'  sequence
tagggaagagaaggacatatgatcaacaaaccggcactagatattggctcacgttgactagtacatgaccacttga

SEQ ID NO: 43181 - DNA, 76 bp, Artificial Sequence
  Description of Artificial Sequence: Synthetic gluten; 5' sequence + inner sequence + 3'  sequence
tagggaagagaaggacatatgatggacgaaatgcccgaaagtgcgtcaacgtattgactagtacatgaccacttga

SEQ ID NO: 43182 - DNA, 76 bp, Artificial Sequence
  Description of Artificial Sequence: Synthetic gluten; 5' sequence + inner sequence + 3'  sequence
tagggaagagaaggacatatgatgaacggcgcgacctatcaggtgagcatggattgactagtacatgaccacttga

SEQ ID NO: 43183 - DNA, 76 bp, Artificial Sequence; identical to SEQ ID NO: 3208
  Description of Artificial Sequence: Synthetic gluten; 5' sequence + inner sequence + 3'  sequence

SEQ ID NO: 43184 - DNA, 76 bp, Artificial Sequence
  Description of Artificial Sequence: Synthetic gluten; 5' sequence + inner sequence + 3'  sequence
tagggaagagaaggacatatgattggactgaacgaaccgaatcatgatgcgcattgactagtacatgaccacttga

SEQ ID NO: 43185 - DNA, 76 bp, Artificial Sequence; identical to SEQ ID NO: 3020
  Description of Artificial Sequence: Synthetic gluten; 5' sequence + inner sequence + 3'  sequence

SEQ ID NO: 43186 - DNA, 76 bp, Artificial Sequence; identical to SEQ ID NO: 3740
  Description of Artificial Sequence: Synthetic gluten; 5' sequence + inner sequence + 3'  sequence

SEQ ID NO: 43187 - DNA, 76 bp, Artificial Sequence; identical to SEQ ID NO: 39552
  Description of Artificial Sequence: Synthetic gluten; 5' sequence + inner sequence + 3'  sequence

SEQ ID NO: 43188 - DNA, 76 bp, Artificial Sequence
  Description of Artificial Sequence: Synthetic gluten; 5' sequence + inner sequence + 3'  sequence
tagggaagagaaggacatatgataatacgtccgaatctggatgtgcgaatgtattgactagtacatgaccacttga

SEQ ID NO: 43189 - DNA, 76 bp, Artificial Sequence
  Description of Artificial Sequence: Synthetic gluten; 5' sequence + inner sequence + 3'  sequence
tagggaagagaaggacatatgatgaccaagcgatacctagcaagtgtggaatgttgactagtacatgaccacttga

SEQ ID NO: 43190 - DNA, 76 bp, Artificial Sequence; identical to SEQ ID NO: 31849
  Description of Artificial Sequence: Synthetic gluten; 5' sequence + inner sequence + 3'  sequence

SEQ ID NO: 43191 - DNA, 76 bp, Artificial Sequence
  Description of Artificial Sequence: Synthetic gluten; 5' sequence + inner sequence + 3'  sequence
tagggaagagaaggacatatgatgaccgagcgacctatagagcatgcacttgcttgactagtacatgaccacttga

SEQ ID NO: 43192 - DNA, 76 bp, Artificial Sequence; identical to SEQ ID NO: 31452
  Description of Artificial Sequence: Synthetic gluten; 5' sequence + inner sequence + 3'  sequence

SEQ ID NO: 43193 - DNA, 76 bp, Artificial Sequence; identical to SEQ ID NO: 3004
  Description of Artificial Sequence: Synthetic gluten; 5' sequence + inner sequence + 3'  sequence

SEQ ID NO: 43194 - DNA, 76 bp, Artificial Sequence
  Description of Artificial Sequence: Synthetic gluten; 5' sequence + inner sequence + 3'  sequence
tagggaagagaaggacatatgatgtacgatgcgaccgaagtgatcacagcagcttgactagtacatgaccacttga

SEQ ID NO: 43195 - DNA, 76 bp, Artificial Sequence
  Description of Artificial Sequence: Synthetic gluten; 5' sequence + inner sequence + 3'  sequence
tagggaagagaaggacatatgatgacattcgctgaacgttcaagggacgtggattgactagtacatgaccacttga

SEQ ID NO: 43196 - DNA, 76 bp, Artificial Sequence
  Description of Artificial Sequence: Synthetic gluten; 5' sequence + inner sequence + 3'  sequence
tagggaagagaaggacatatgatgacgcctcgtaccctgaaagtgcgagtgtattgactagtacatgaccacttga

SEQ ID NO: 43197 - DNA, 76 bp, Artificial Sequence
  Description of Artificial Sequence: Synthetic gluten; 5' sequence + inner sequence + 3'  sequence
tagggaagagaaggacatatgatggcatgcgctgggcagtgatcacgtacggtttgactagtacatgaccacttga

SEQ ID NO: 43198 - DNA, 76 bp, Artificial Sequence
  Description of Artificial Sequence: Synthetic gluten; 5' sequence + inner sequence + 3'  sequence
tagggaagagaaggacatatgatcatgctcgtaacacagacaaacagttcatattgactagtacatgaccacttga

SEQ ID NO: 43199 - DNA, 76 bp, Artificial Sequence; identical to SEQ ID NO: 3346
  Description of Artificial Sequence: Synthetic gluten; 5' sequence + inner sequence + 3'  sequence

SEQ ID NO: 43200 - DNA, 76 bp, Artificial Sequence
  Description of Artificial Sequence: Synthetic gluten; 5' sequence + inner sequence + 3'  sequence
tagggaagagaaggacatatgattggccgatcgaccctatcaagtgcagcacgttgactagtacatgaccacttga

SEQ ID NO: 43201 - DNA, 76 bp, Artificial Sequence
  Description of Artificial Sequence: Synthetic gluten; 5' sequence + inner sequence + 3'  sequence
tagggaagagaaggacatatgatggcctgagctggcattgcgctggacatgtattgactagtacatgaccacttga

SEQ ID NO: 43202 - DNA, 76 bp, Artificial Sequence; identical to SEQ ID NO: 39873
  Description of Artificial Sequence: Synthetic gluten; 5' sequence + inner sequence + 3'  sequence

SEQ ID NO: 43203 - DNA, 76 bp, Artificial Sequence; identical to SEQ ID NO: 19949
  Description of Artificial Sequence: Synthetic gluten; 5' sequence + inner sequence + 3'  sequence

SEQ ID NO: 43204 - DNA, 76 bp, Artificial Sequence
  Description of Artificial Sequence: Synthetic gluten; 5' sequence + inner sequence + 3'  sequence
tagggaagagaaggacatatgattcgacgcagtcaaacgcatatgacgcactcttgactagtacatgaccacttga

SEQ ID NO: 43205 - DNA, 76 bp, Artificial Sequence; identical to SEQ ID NO: 39878
  Description of Artificial Sequence: Synthetic gluten; 5' sequence + inner sequence + 3'  sequence

SEQ ID NO: 43206 - DNA, 76 bp, Artificial Sequence
  Description of Artificial Sequence: Synthetic gluten; 5' sequence + inner sequence + 3'  sequence
tagggaagagaaggacatatgatcatgtacgatcaggaaagcggttcgtcatattgactagtacatgaccacttga

SEQ ID NO: 43207 - DNA, 76 bp, Artificial Sequence
  Description of Artificial Sequence: Synthetic gluten; 5' sequence + inner sequence + 3'  sequence
tagggaagagaaggacatatgatcattcgatgagctagcgagtgccgtggaccttgactagtacatgaccacttga

SEQ ID NO: 43208 - DNA, 76 bp, Artificial Sequence
  Description of Artificial Sequence: Synthetic gluten; 5' sequence + inner sequence + 3'  sequence
tagggaagagaaggacatatgatgacttcgatgaccgacatgtaacagtcttattgactagtacatgaccacttga

SEQ ID NO: 43209 - DNA, 76 bp, Artificial Sequence
  Description of Artificial Sequence: Synthetic gluten; 5' sequence + inner sequence + 3'  sequence
tagggaagagaaggacatatgatcgataccatagagccgaagatcagtgcacgttgactagtacatgaccacttga

SEQ ID NO: 43210 - DNA, 76 bp, Artificial Sequence
  Description of Artificial Sequence: Synthetic gluten; 5' sequence + inner sequence + 3'  sequence
tagggaagagaaggacatatgattgcatcacatgaaagcataggtcctgtgggttgactagtacatgaccacttga

SEQ ID NO: 43211 - DNA, 76 bp, Artificial Sequence
  Description of Artificial Sequence: Synthetic gluten; 5' sequence + inner sequence + 3'  sequence
tagggaagagaaggacatatgatagattggcatgatctgaccgaaagtgcgtcttgactagtacatgaccacttga

SEQ ID NO: 43212 - DNA, 76 bp, Artificial Sequence
  Description of Artificial Sequence: Synthetic gluten; 5' sequence + inner sequence + 3'  sequence
tagggaagagaaggacatatgattgtcctgaacgaccctatttgacctgcgcattgactagtacatgaccacttga

SEQ ID NO: 43213 - DNA, 76 bp, Artificial Sequence
  Description of Artificial Sequence: Synthetic gluten; 5' sequence + inner sequence + 3'  sequence
tagggaagagaaggacatatgatcatgtgtccgaagcttcacgtatgtcagcattgactagtacatgaccacttga

SEQ ID NO: 43214 - DNA, 76 bp, Artificial Sequence; identical to SEQ ID NO: 39384
  Description of Artificial Sequence: Synthetic gluten; 5' sequence + inner sequence + 3'  sequence

SEQ ID NO: 43215 - DNA, 76 bp, Artificial Sequence; identical to SEQ ID NO: 3018
  Description of Artificial Sequence: Synthetic gluten; 5' sequence + inner sequence + 3'  sequence

SEQ ID NO: 43216 - DNA, 76 bp, Artificial Sequence; identical to SEQ ID NO: 3686
  Description of Artificial Sequence: Synthetic gluten; 5' sequence + inner sequence + 3'  sequence

SEQ ID NO: 43217 - DNA, 76 bp, Artificial Sequence; identical to SEQ ID NO: 11922
  Description of Artificial Sequence: Synthetic gluten; 5' sequence + inner sequence + 3'  sequence

SEQ ID NO: 43218 - DNA, 76 bp, Artificial Sequence
  Description of Artificial Sequence: Synthetic gluten; 5' sequence + inner sequence + 3'  sequence
tagggaagagaaggacatatgatgtactgagcgaaccgcatcgtgatcatggattgactagtacatgaccacttga

SEQ ID NO: 43219 - DNA, 76 bp, Artificial Sequence
  Description of Artificial Sequence: Synthetic gluten; 5' sequence + inner sequence + 3'  sequence
tagggaagagaaggacatatgatagcatgtcggacgatggatgtgagcatgtattgactagtacatgaccacttga

SEQ ID NO: 43220 - DNA, 76 bp, Artificial Sequence; identical to SEQ ID NO: 39974
  Description of Artificial Sequence: Synthetic gluten; 5' sequence + inner sequence + 3'  sequence

SEQ ID NO: 43221 - DNA, 76 bp, Artificial Sequence
  Description of Artificial Sequence: Synthetic gluten; 5' sequence + inner sequence + 3'  sequence
tagggaagagaaggacatatgatgtacgacgcggaccctatcaagacggcatgttgactagtacatgaccacttga

SEQ ID NO: 43222 - DNA, 76 bp, Artificial Sequence; identical to SEQ ID NO: 3054
  Description of Artificial Sequence: Synthetic gluten; 5' sequence + inner sequence + 3'  sequence

SEQ ID NO: 43223 - DNA, 76 bp, Artificial Sequence; identical to SEQ ID NO: 39839
  Description of Artificial Sequence: Synthetic gluten; 5' sequence + inner sequence + 3'  sequence

SEQ ID NO: 43224 - DNA, 76 bp, Artificial Sequence
  Description of Artificial Sequence: Synthetic gluten; 5' sequence + inner sequence + 3'  sequence
tagggaagagaaggacatatgatggactgcgatggaatgtgcgaatgtacgcattgactagtacatgaccacttga

SEQ ID NO: 43225 - DNA, 76 bp, Artificial Sequence
  Description of Artificial Sequence: Synthetic gluten; 5' sequence + inner sequence + 3'  sequence
tagggaagagaaggacatatgatccgtgaggacgcaaggttgatgtaagagtcttgactagtacatgaccacttga

SEQ ID NO: 43226 - DNA, 76 bp, Artificial Sequence
  Description of Artificial Sequence: Synthetic gluten; 5' sequence + inner sequence + 3'  sequence
tagggaagagaaggacatatgatccgaacgacctgtcacgtctaggcaacacattgactagtacatgaccacttga

SEQ ID NO: 43227 - DNA, 76 bp, Artificial Sequence
  Description of Artificial Sequence: Synthetic gluten; 5' sequence + inner sequence + 3'  sequence
tagggaagagaaggacatatgatcatggctaacaaagggcgactgagctcatattgactagtacatgaccacttga

SEQ ID NO: 43228 - DNA, 76 bp, Artificial Sequence
  Description of Artificial Sequence: Synthetic gluten; 5' sequence + inner sequence + 3'  sequence
tagggaagagaaggacatatgatgtactgcgcgaacgatcgagtgggcctggattgactagtacatgaccacttga

SEQ ID NO: 43229 - DNA, 76 bp, Artificial Sequence
  Description of Artificial Sequence: Synthetic gluten; 5' sequence + inner sequence + 3'  sequence
tagggaagagaaggacatatgatgtctgacgaggacctgagagtgcgcatgtattgactagtacatgaccacttga

SEQ ID NO: 43230 - DNA, 76 bp, Artificial Sequence
  Description of Artificial Sequence: Synthetic gluten; 5' sequence + inner sequence + 3'  sequence
tagggaagagaaggacatatgatccgtagcgtcacctatcatgtggccaggtattgactagtacatgaccacttga

SEQ ID NO: 43231 - DNA, 76 bp, Artificial Sequence
  Description of Artificial Sequence: Synthetic gluten; 5' sequence + inner sequence + 3'  sequence
tagggaagagaaggacatatgatggcctgcgagtacctacgagtgatcaggtattgactagtacatgaccacttga

SEQ ID NO: 43232 - DNA, 76 bp, Artificial Sequence; identical to SEQ ID NO: 3079
  Description of Artificial Sequence: Synthetic gluten; 5' sequence + inner sequence + 3'  sequence

SEQ ID NO: 43233 - DNA, 76 bp, Artificial Sequence; identical to SEQ ID NO: 3389
  Description of Artificial Sequence: Synthetic gluten; 5' sequence + inner sequence + 3'  sequence

SEQ ID NO: 43234 - DNA, 76 bp, Artificial Sequence; identical to SEQ ID NO: 31298
  Description of Artificial Sequence: Synthetic gluten; 5' sequence + inner sequence + 3'  sequence

SEQ ID NO: 43235 - DNA, 76 bp, Artificial Sequence; identical to SEQ ID NO: 3310
  Description of Artificial Sequence: Synthetic gluten; 5' sequence + inner sequence + 3'  sequence

SEQ ID NO: 43236 - DNA, 76 bp, Artificial Sequence
  Description of Artificial Sequence: Synthetic gluten; 5' sequence + inner sequence + 3'  sequence
tagggaagagaaggacatatgatgcgtgcaccctttagcagcttgcgtcaacattgactagtacatgaccacttga

SEQ ID NO: 43237 - DNA, 76 bp, Artificial Sequence; identical to SEQ ID NO: 3061
  Description of Artificial Sequence: Synthetic gluten; 5' sequence + inner sequence + 3'  sequence

SEQ ID NO: 43238 - DNA, 76 bp, Artificial Sequence; identical to SEQ ID NO: 3111
  Description of Artificial Sequence: Synthetic gluten; 5' sequence + inner sequence + 3'  sequence

SEQ ID NO: 43239 - DNA, 76 bp, Artificial Sequence
  Description of Artificial Sequence: Synthetic gluten; 5' sequence + inner sequence + 3'  sequence
tagggaagagaaggacatatgattcagagccgaagaccaggcataacgaagtattgactagtacatgaccacttga

SEQ ID NO: 43240 - DNA, 76 bp, Artificial Sequence
  Description of Artificial Sequence: Synthetic gluten; 5' sequence + inner sequence + 3'  sequence
tagggaagagaaggacatatgatggactgagctggatgtggctgcactagtgtttgactagtacatgaccacttga

SEQ ID NO: 43241 - DNA, 76 bp, Artificial Sequence
  Description of Artificial Sequence: Synthetic gluten; 5' sequence + inner sequence + 3'  sequence
tagggaagagaaggacatatgatacgtacgtgctgaacgaccttcaagggacattgactagtacatgaccacttga

SEQ ID NO: 43242 - DNA, 76 bp, Artificial Sequence
  Description of Artificial Sequence: Synthetic gluten; 5' sequence + inner sequence + 3'  sequence
tagggaagagaaggacatatgatagtatgacatcgcgaccctacgagtggacattgactagtacatgaccacttga

SEQ ID NO: 43243 - DNA, 76 bp, Artificial Sequence
  Description of Artificial Sequence: Synthetic gluten; 5' sequence + inner sequence + 3'  sequence
tagggaagagaaggacatatgatcatggccgagcggagataagcttgcagctattgactagtacatgaccacttga

SEQ ID NO: 43244 - DNA, 76 bp, Artificial Sequence; identical to SEQ ID NO: 3067
  Description of Artificial Sequence: Synthetic gluten; 5' sequence + inner sequence + 3'  sequence

SEQ ID NO: 43245 - DNA, 76 bp, Artificial Sequence
  Description of Artificial Sequence: Synthetic gluten; 5' sequence + inner sequence + 3'  sequence
tagggaagagaaggacatatgattagcacagcacatcacgagatatcgcgcacttgactagtacatgaccacttga

SEQ ID NO: 43246 - DNA, 76 bp, Artificial Sequence
  Description of Artificial Sequence: Synthetic gluten; 5' sequence + inner sequence + 3'  sequence
tagggaagagaaggacatatgatcttcccgtcaggcaggcattgcacgcaggcttgactagtacatgaccacttga

SEQ ID NO: 43247 - DNA, 76 bp, Artificial Sequence
  Description of Artificial Sequence: Synthetic gluten; 5' sequence + inner sequence + 3'  sequence
tagggaagagaaggacatatgatggcctgcgatgaccggtctgtataggcaatttgactagtacatgaccacttga

SEQ ID NO: 43248 - DNA, 76 bp, Artificial Sequence
  Description of Artificial Sequence: Synthetic gluten; 5' sequence + inner sequence + 3'  sequence
tagggaagagaaggacatatgatggccggcgatggatgtgaaatggcttgtctttgactagtacatgaccacttga

SEQ ID NO: 43249 - DNA, 76 bp, Artificial Sequence
  Description of Artificial Sequence: Synthetic gluten; 5' sequence + inner sequence + 3'  sequence
tagggaagagaaggacatatgattggactgcgagtcacacaagtgcatgtctattgactagtacatgaccacttga

SEQ ID NO: 43250 - DNA, 76 bp, Artificial Sequence
  Description of Artificial Sequence: Synthetic gluten; 5' sequence + inner sequence + 3'  sequence
tagggaagagaaggacatatgatcgtacatgagtggcgacatcccctttgtcattgactagtacatgaccacttga

SEQ ID NO: 43251 - DNA, 76 bp, Artificial Sequence; identical to SEQ ID NO: 11950
  Description of Artificial Sequence: Synthetic gluten; 5' sequence + inner sequence + 3'  sequence

SEQ ID NO: 43252 - DNA, 76 bp, Artificial Sequence; identical to SEQ ID NO: 7592
  Description of Artificial Sequence: Synthetic gluten; 5' sequence + inner sequence + 3'  sequence

SEQ ID NO: 43253 - DNA, 76 bp, Artificial Sequence
  Description of Artificial Sequence: Synthetic gluten; 5' sequence + inner sequence + 3'  sequence
tagggaagagaaggacatatgatgtacgtcgaggccctacaagtgagagggtattgactagtacatgaccacttga

SEQ ID NO: 43254 - DNA, 76 bp, Artificial Sequence; identical to SEQ ID NO: 3548
  Description of Artificial Sequence: Synthetic gluten; 5' sequence + inner sequence + 3'  sequence

SEQ ID NO: 43255 - DNA, 76 bp, Artificial Sequence
  Description of Artificial Sequence: Synthetic gluten; 5' sequence + inner sequence + 3'  sequence
tagggaagagaaggacatatgattgtccgacgcgaccatatcaagtgcatggattgactagtacatgaccacttga

SEQ ID NO: 43256 - DNA, 76 bp, Artificial Sequence
  Description of Artificial Sequence: Synthetic gluten; 5' sequence + inner sequence + 3'  sequence
tagggaagagaaggacatatgatcatggccgagagaagctacactaaggcacattgactagtacatgaccacttga

SEQ ID NO: 43257 - DNA, 75 bp, Artificial Sequence
  Description of Artificial Sequence: Synthetic gluten; 5' sequence + inner sequence + 3'  sequence
tagggaagagaaggacatatgatgacgcactctaccctacatgcactacgtcttgactagtacatgaccacttga

SEQ ID NO: 43258 - DNA, 76 bp, Artificial Sequence; identical to SEQ ID NO: 11682
  Description of Artificial Sequence: Synthetic gluten; 5' sequence + inner sequence + 3'  sequence

SEQ ID NO: 43259 - DNA, 76 bp, Artificial Sequence
  Description of Artificial Sequence: Synthetic gluten; 5' sequence + inner sequence + 3'  sequence
tagggaagagaaggacatatgatcgcaccctatcacgtggaagtgaacttggcttgactagtacatgaccacttga

SEQ ID NO: 43260 - DNA, 71 bp, Artificial Sequence
  Description of Artificial Sequence: Synthetic gluten; 5' sequence + inner sequence + 3'  sequence
tagggaagagaaggacatatgatggcctgcgatggatgtgtgcatgtattgactagtacatgaccacttga

SEQ ID NO: 43261 - DNA, 76 bp, Artificial Sequence
  Description of Artificial Sequence: Synthetic gluten; 5' sequence + inner sequence + 3'  sequence
tagggaagagaaggacatatgatcatgtcgagaccagtgcactttgcagcatattgactagtacatgaccacttga

SEQ ID NO: 43262 - DNA, 76 bp, Artificial Sequence
  Description of Artificial Sequence: Synthetic gluten; 5' sequence + inner sequence + 3'  sequence
tagggaagagaaggacatatgatcaaccgactgcaagtaccatatggctcacgttgactagtacatgaccacttga

SEQ ID NO: 43263 - DNA, 76 bp, Artificial Sequence
  Description of Artificial Sequence: Synthetic gluten; 5' sequence + inner sequence + 3'  sequence
tagggaagagaaggacatatgatggcctgatcgaacctagcgagtggcgtggattgactagtacatgaccacttga

SEQ ID NO: 43264 - DNA, 76 bp, Artificial Sequence
  Description of Artificial Sequence: Synthetic gluten; 5' sequence + inner sequence + 3'  sequence
tagggaagagaaggacatatgatcaacaaatcgcggactcgtaatgtctcacgttgactagtacatgaccacttga

SEQ ID NO: 43265 - DNA, 76 bp, Artificial Sequence; identical to SEQ ID NO: 3048
  Description of Artificial Sequence: Synthetic gluten; 5' sequence + inner sequence + 3'  sequence

SEQ ID NO: 43266 - DNA, 76 bp, Artificial Sequence
  Description of Artificial Sequence: Synthetic gluten; 5' sequence + inner sequence + 3'  sequence
tagggaagagaaggacatatgatcctccgaggcagctatctcatggacgcgaattgactagtacatgaccacttga

SEQ ID NO: 43267 - DNA, 76 bp, Artificial Sequence
  Description of Artificial Sequence: Synthetic gluten; 5' sequence + inner sequence + 3'  sequence
tagggaagagaaggacatatgatgacgacgatgacctagtaatggacgtgttcttgactagtacatgaccacttga

SEQ ID NO: 43268 - DNA, 76 bp, Artificial Sequence
  Description of Artificial Sequence: Synthetic gluten; 5' sequence + inner sequence + 3'  sequence
tagggaagagaaggacatatgatcgggaggctgaaaggaacagttcacgcaacttgactagtacatgaccacttga

SEQ ID NO: 43269 - DNA, 76 bp, Artificial Sequence
  Description of Artificial Sequence: Synthetic gluten; 5' sequence + inner sequence + 3'  sequence
tagggaagagaaggacatatgatggccgcggcttccctgaaatggacgcagcgttgactagtacatgaccacttga

SEQ ID NO: 43270 - DNA, 76 bp, Artificial Sequence; identical to SEQ ID NO: 3076
  Description of Artificial Sequence: Synthetic gluten; 5' sequence + inner sequence + 3'  sequence

SEQ ID NO: 43271 - DNA, 76 bp, Artificial Sequence; identical to SEQ ID NO: 3154
  Description of Artificial Sequence: Synthetic gluten; 5' sequence + inner sequence + 3'  sequence

SEQ ID NO: 43272 - DNA, 76 bp, Artificial Sequence
  Description of Artificial Sequence: Synthetic gluten; 5' sequence + inner sequence + 3'  sequence
tagggaagagaaggacatatgatggactgcgatgagctcaaggggagcatggattgactagtacatgaccacttga

SEQ ID NO: 43273 - DNA, 76 bp, Artificial Sequence
  Description of Artificial Sequence: Synthetic gluten; 5' sequence + inner sequence + 3'  sequence
tagggaagagaaggacatatgataatgtggacggctcgaaccctagctaggcattgactagtacatgaccacttga

SEQ ID NO: 43274 - DNA, 76 bp, Artificial Sequence
  Description of Artificial Sequence: Synthetic gluten; 5' sequence + inner sequence + 3'  sequence
tagggaagagaaggacatatgatgacagcgcagatgaagaatacgacgactctttgactagtacatgaccacttga

SEQ ID NO: 43275 - DNA, 76 bp, Artificial Sequence
  Description of Artificial Sequence: Synthetic gluten; 5' sequence + inner sequence + 3'  sequence
tagggaagagaaggacatatgatcatgacgcagtaagcacgtatcgtggcatattgactagtacatgaccacttga

SEQ ID NO: 43276 - DNA, 76 bp, Artificial Sequence
  Description of Artificial Sequence: Synthetic gluten; 5' sequence + inner sequence + 3'  sequence
tagggaagagaaggacatatgatgtcatgcacagaccggtaagtgctcaggtattgactagtacatgaccacttga

SEQ ID NO: 43277 - DNA, 76 bp, Artificial Sequence; identical to SEQ ID NO: 7552
  Description of Artificial Sequence: Synthetic gluten; 5' sequence + inner sequence + 3'  sequence

SEQ ID NO: 43278 - DNA, 76 bp, Artificial Sequence; identical to SEQ ID NO: 3362
  Description of Artificial Sequence: Synthetic gluten; 5' sequence + inner sequence + 3'  sequence

SEQ ID NO: 43279 - DNA, 76 bp, Artificial Sequence; identical to SEQ ID NO: 3850
  Description of Artificial Sequence: Synthetic gluten; 5' sequence + inner sequence + 3'  sequence

SEQ ID NO: 43280 - DNA, 76 bp, Artificial Sequence
  Description of Artificial Sequence: Synthetic gluten; 5' sequence + inner sequence + 3'  sequence
tagggaagagaaggacatatgatcgaacacgcacgtgctttgaggactagaggttgactagtacatgaccacttga

SEQ ID NO: 43281 - DNA, 76 bp, Artificial Sequence
  Description of Artificial Sequence: Synthetic gluten; 5' sequence + inner sequence + 3'  sequence
tagggaagagaaggacatatgatggcatgcgctgggaagtgatcacgtacggtttgactagtacatgaccacttga

SEQ ID NO: 43282 - DNA, 76 bp, Artificial Sequence
  Description of Artificial Sequence: Synthetic gluten; 5' sequence + inner sequence + 3'  sequence
tagggaagagaaggacatatgatgcactgagcgaacccttgtcatgggacgtattgactagtacatgaccacttga

SEQ ID NO: 43283 - DNA, 76 bp, Artificial Sequence
  Description of Artificial Sequence: Synthetic gluten; 5' sequence + inner sequence + 3'  sequence
tagggaagagaaggacatatgatcaatcacatggtgcggactgatggttcaagttgactagtacatgaccacttga

SEQ ID NO: 43284 - DNA, 76 bp, Artificial Sequence
  Description of Artificial Sequence: Synthetic gluten; 5' sequence + inner sequence + 3'  sequence
tagggaagagaaggacatatgatggcccgacgacccttcaagtgaccatcgtattgactagtacatgaccacttga

SEQ ID NO: 43285 - DNA, 76 bp, Artificial Sequence
  Description of Artificial Sequence: Synthetic gluten; 5' sequence + inner sequence + 3'  sequence
tagggaagagaaggacatatgatgtcatgcactgatccgacaatgggcgtgaattgactagtacatgaccacttga

SEQ ID NO: 43286 - DNA, 76 bp, Artificial Sequence; identical to SEQ ID NO: 3355
  Description of Artificial Sequence: Synthetic gluten; 5' sequence + inner sequence + 3'  sequence

SEQ ID NO: 43287 - DNA, 76 bp, Artificial Sequence
  Description of Artificial Sequence: Synthetic gluten; 5' sequence + inner sequence + 3'  sequence
tagggaagagaaggacatatgatcatgttcggaccagagcggtctccggcatattgactagtacatgaccacttga

SEQ ID NO: 43288 - DNA, 76 bp, Artificial Sequence
  Description of Artificial Sequence: Synthetic gluten; 5' sequence + inner sequence + 3'  sequence
tagggaagagaaggacatatgatggcattcgacctgcctatcaagggtgctcattgactagtacatgaccacttga

SEQ ID NO: 43289 - DNA, 76 bp, Artificial Sequence
  Description of Artificial Sequence: Synthetic gluten; 5' sequence + inner sequence + 3'  sequence
tagggaagagaaggacatatgattgctagtgcaagcagagggcattcgaagggttgactagtacatgaccacttga

SEQ ID NO: 43290 - DNA, 76 bp, Artificial Sequence
  Description of Artificial Sequence: Synthetic gluten; 5' sequence + inner sequence + 3'  sequence
tagggaagagaaggacatatgatggactgatcaaccctaagcatgtggcgatgttgactagtacatgaccacttga

SEQ ID NO: 43291 - DNA, 76 bp, Artificial Sequence
  Description of Artificial Sequence: Synthetic gluten; 5' sequence + inner sequence + 3'  sequence
tagggaagagaaggacatatgatgcgagcggacctaaagaacatgtcgttggcttgactagtacatgaccacttga

SEQ ID NO: 43292 - DNA, 76 bp, Artificial Sequence
  Description of Artificial Sequence: Synthetic gluten; 5' sequence + inner sequence + 3'  sequence
tagggaagagaaggacatatgatagtcacaggaagcaccggaccgattcgtcattgactagtacatgaccacttga

SEQ ID NO: 43293 - DNA, 76 bp, Artificial Sequence
  Description of Artificial Sequence: Synthetic gluten; 5' sequence + inner sequence + 3'  sequence
tagggaagagaaggacatatgatccgaaccgacatgctaatgaagtgtacgtattgactagtacatgaccacttga

SEQ ID NO: 43294 - DNA, 76 bp, Artificial Sequence
  Description of Artificial Sequence: Synthetic gluten; 5' sequence + inner sequence + 3'  sequence
tagggaagagaaggacatatgatgcaacgcagcatggacgaatctggatgtggttgactagtacatgaccacttga

SEQ ID NO: 43295 - DNA, 76 bp, Artificial Sequence
  Description of Artificial Sequence: Synthetic gluten; 5' sequence + inner sequence + 3'  sequence
tagggaagagaaggacatatgatggcatgatcgaacctagagagtggcgtggattgactagtacatgaccacttga

SEQ ID NO: 43296 - DNA, 76 bp, Artificial Sequence
  Description of Artificial Sequence: Synthetic gluten; 5' sequence + inner sequence + 3'  sequence
tagggaagagaaggacatatgatgtcatgcgcggacattcaagctggcgtggattgactagtacatgaccacttga

SEQ ID NO: 43297 - DNA, 76 bp, Artificial Sequence
  Description of Artificial Sequence: Synthetic gluten; 5' sequence + inner sequence + 3'  sequence
tagggaagagaaggacatatgatggactgatcgaacctagagagtggcgtggattgactagtacatgaccacttga

SEQ ID NO: 43298 - DNA, 76 bp, Artificial Sequence
  Description of Artificial Sequence: Synthetic gluten; 5' sequence + inner sequence + 3'  sequence
tagggaagagaaggacatatgatcatgtgcgatcagagcggtgcaccggcatattgactagtacatgaccacttga

SEQ ID NO: 43299 - DNA, 76 bp, Artificial Sequence
  Description of Artificial Sequence: Synthetic gluten; 5' sequence + inner sequence + 3'  sequence
tagggaagagaaggacatatgataccgtcaggcagaagaggactgagcgcacattgactagtacatgaccacttga

SEQ ID NO: 43300 - DNA, 76 bp, Artificial Sequence; identical to SEQ ID NO: 3329
  Description of Artificial Sequence: Synthetic gluten; 5' sequence + inner sequence + 3'  sequence

SEQ ID NO: 43301 - DNA, 76 bp, Artificial Sequence
  Description of Artificial Sequence: Synthetic gluten; 5' sequence + inner sequence + 3'  sequence
tagggaagagaaggacatatgattcgcatatggctacgatgaccgatgtgggcttgactagtacatgaccacttga

SEQ ID NO: 43302 - DNA, 76 bp, Artificial Sequence
  Description of Artificial Sequence: Synthetic gluten; 5' sequence + inner sequence + 3'  sequence
tagggaagagaaggacatatgatcgcaacgcctcttggtgcatcgccatgtctttgactagtacatgaccacttga

SEQ ID NO: 43303 - DNA, 76 bp, Artificial Sequence; identical to SEQ ID NO: 3030
  Description of Artificial Sequence: Synthetic gluten; 5' sequence + inner sequence + 3'  sequence

SEQ ID NO: 43304 - DNA, 71 bp, Artificial Sequence
  Description of Artificial Sequence: Synthetic gluten; 5' sequence + inner sequence + 3'  sequence
tagggaagagaaggacatatgatggcatgcgatggatgtgtgcgtgtattgactagtacatgaccacttga

SEQ ID NO: 43305 - DNA, 76 bp, Artificial Sequence
  Description of Artificial Sequence: Synthetic gluten; 5' sequence + inner sequence + 3'  sequence
tagggaagagaaggacatatgatactcccctagcatgagtgggctatgaagcattgactagtacatgaccacttga

SEQ ID NO: 43306 - DNA, 76 bp, Artificial Sequence
  Description of Artificial Sequence: Synthetic gluten; 5' sequence + inner sequence + 3'  sequence
tagggaagagaaggacatatgatccgatcgaagctaaagagcatgaacgtggcttgactagtacatgaccacttga

SEQ ID NO: 43307 - DNA, 76 bp, Artificial Sequence; identical to SEQ ID NO: 3800
  Description of Artificial Sequence: Synthetic gluten; 5' sequence + inner sequence + 3'  sequence

SEQ ID NO: 43308 - DNA, 76 bp, Artificial Sequence
  Description of Artificial Sequence: Synthetic gluten; 5' sequence + inner sequence + 3'  sequence
tagggaagagaaggacatatgatcatgtacgaccgcaaaggctcagctcaatattgactagtacatgaccacttga

SEQ ID NO: 43309 - DNA, 76 bp, Artificial Sequence
  Description of Artificial Sequence: Synthetic gluten; 5' sequence + inner sequence + 3'  sequence
tagggaagagaaggacatatgatggacttcgcgaacttcatggctggcatccattgactagtacatgaccacttga

SEQ ID NO: 43310 - DNA, 76 bp, Artificial Sequence; identical to SEQ ID NO: 39617
  Description of Artificial Sequence: Synthetic gluten; 5' sequence + inner sequence + 3'  sequence

SEQ ID NO: 43311 - DNA, 76 bp, Artificial Sequence
  Description of Artificial Sequence: Synthetic gluten; 5' sequence + inner sequence + 3'  sequence
tagggaagagaaggacatatgatggacgaagcttccctgctactacgtcacgattgactagtacatgaccacttga

SEQ ID NO: 43312 - DNA, 76 bp, Artificial Sequence
  Description of Artificial Sequence: Synthetic gluten; 5' sequence + inner sequence + 3'  sequence
tagggaagagaaggacatatgatggccgacgatggatgtagttatggaccagcttgactagtacatgaccacttga

SEQ ID NO: 43313 - DNA, 76 bp, Artificial Sequence
  Description of Artificial Sequence: Synthetic gluten; 5' sequence + inner sequence + 3'  sequence
tagggaagagaaggacatatgatccgcactctggatgggtcacgcacgagtcattgactagtacatgaccacttga

SEQ ID NO: 43314 - DNA, 76 bp, Artificial Sequence
  Description of Artificial Sequence: Synthetic gluten; 5' sequence + inner sequence + 3'  sequence
tagggaagagaaggacatatgataatacgcccgaccttacctacacgtgatcattgactagtacatgaccacttga

SEQ ID NO: 43315 - DNA, 76 bp, Artificial Sequence
  Description of Artificial Sequence: Synthetic gluten; 5' sequence + inner sequence + 3'  sequence
tagggaagagaaggacatatgatccatatggcaggcgattaccgatgtgcgtattgactagtacatgaccacttga

SEQ ID NO: 43316 - DNA, 76 bp, Artificial Sequence; identical to SEQ ID NO: 39722
  Description of Artificial Sequence: Synthetic gluten; 5' sequence + inner sequence + 3'  sequence

SEQ ID NO: 43317 - DNA, 76 bp, Artificial Sequence
  Description of Artificial Sequence: Synthetic gluten; 5' sequence + inner sequence + 3'  sequence
tagggaagagaaggacatatgatacgtcacgggtaacaagcttgccaattgtgttgactagtacatgaccacttga

SEQ ID NO: 43318 - DNA, 76 bp, Artificial Sequence
  Description of Artificial Sequence: Synthetic gluten; 5' sequence + inner sequence + 3'  sequence
tagggaagagaaggacatatgatcccagaatcacaacaaacgtgcacgctagcttgactagtacatgaccacttga

SEQ ID NO: 43319 - DNA, 76 bp, Artificial Sequence
  Description of Artificial Sequence: Synthetic gluten; 5' sequence + inner sequence + 3'  sequence
tagggaagagaaggacatatgatcatgtacgacagaggtgcagagcagacatattgactagtacatgaccacttga

SEQ ID NO: 43320 - DNA, 76 bp, Artificial Sequence
  Description of Artificial Sequence: Synthetic gluten; 5' sequence + inner sequence + 3'  sequence
tagggaagagaaggacatatgatggactgaacgagatctggcttgcaataggcttgactagtacatgaccacttga

SEQ ID NO: 43321 - DNA, 76 bp, Artificial Sequence
  Description of Artificial Sequence: Synthetic gluten; 5' sequence + inner sequence + 3'  sequence
tagggaagagaaggacatatgatagtatggcctgcgatggatcgacgttcacattgactagtacatgaccacttga

SEQ ID NO: 43322 - DNA, 76 bp, Artificial Sequence; identical to SEQ ID NO: 3081
  Description of Artificial Sequence: Synthetic gluten; 5' sequence + inner sequence + 3'  sequence

SEQ ID NO: 43323 - DNA, 76 bp, Artificial Sequence
  Description of Artificial Sequence: Synthetic gluten; 5' sequence + inner sequence + 3'  sequence
tagggaagagaaggacatatgatgacgccacgcagcctaatcgtgatcatgtattgactagtacatgaccacttga

SEQ ID NO: 43324 - DNA, 76 bp, Artificial Sequence; identical to SEQ ID NO: 3392
  Description of Artificial Sequence: Synthetic gluten; 5' sequence + inner sequence + 3'  sequence

SEQ ID NO: 43325 - DNA, 76 bp, Artificial Sequence
  Description of Artificial Sequence: Synthetic gluten; 5' sequence + inner sequence + 3'  sequence
tagggaagagaaggacatatgattcagatggcatgaacggcatgacgacgtgattgactagtacatgaccacttga

SEQ ID NO: 43326 - DNA, 76 bp, Artificial Sequence
  Description of Artificial Sequence: Synthetic gluten; 5' sequence + inner sequence + 3'  sequence
tagggaagagaaggacatatgatgcatgacggacttgaacgatctcctttggcttgactagtacatgaccacttga

SEQ ID NO: 43327 - DNA, 76 bp, Artificial Sequence; identical to SEQ ID NO: 31644
  Description of Artificial Sequence: Synthetic gluten; 5' sequence + inner sequence + 3'  sequence

SEQ ID NO: 43328 - DNA, 76 bp, Artificial Sequence
  Description of Artificial Sequence: Synthetic gluten; 5' sequence + inner sequence + 3'  sequence
tagggaagagaaggacatatgatacatacgtacgaacgacctcaatgtgcgtcttgactagtacatgaccacttga

SEQ ID NO: 43329 - DNA, 76 bp, Artificial Sequence
  Description of Artificial Sequence: Synthetic gluten; 5' sequence + inner sequence + 3'  sequence
tagggaagagaaggacatatgattctgcatggcctgaacgatccgtgccgtcattgactagtacatgaccacttga

SEQ ID NO: 43330 - DNA, 75 bp, Artificial Sequence; identical to SEQ ID NO: 3334
  Description of Artificial Sequence: Synthetic gluten; 5' sequence + inner sequence + 3'  sequence

SEQ ID NO: 43331 - DNA, 76 bp, Artificial Sequence
  Description of Artificial Sequence: Synthetic gluten; 5' sequence + inner sequence + 3'  sequence
tagggaagagaaggacatatgatgtacgccgctccatcccttcaaggcagtcattgactagtacatgaccacttga

SEQ ID NO: 43332 - DNA, 76 bp, Artificial Sequence
  Description of Artificial Sequence: Synthetic gluten; 5' sequence + inner sequence + 3'  sequence
tagggaagagaaggacatatgatcgccacgaaaccgtaaggttcagcaagtcattgactagtacatgaccacttga

SEQ ID NO: 43333 - DNA, 76 bp, Artificial Sequence; identical to SEQ ID NO: 15933
  Description of Artificial Sequence: Synthetic gluten; 5' sequence + inner sequence + 3'  sequence

SEQ ID NO: 43334 - DNA, 76 bp, Artificial Sequence
  Description of Artificial Sequence: Synthetic gluten; 5' sequence + inner sequence + 3'  sequence
tagggaagagaaggacatatgatctgagtgaggacccaaggttgagtactgccttgactagtacatgaccacttga

SEQ ID NO: 43335 - DNA, 76 bp, Artificial Sequence
  Description of Artificial Sequence: Synthetic gluten; 5' sequence + inner sequence + 3'  sequence
tagggaagagaaggacatatgatcgtaccgacgtaaggagaaaggtatgggttttgactagtacatgaccacttga

SEQ ID NO: 43336 - DNA, 76 bp, Artificial Sequence
  Description of Artificial Sequence: Synthetic gluten; 5' sequence + inner sequence + 3'  sequence
tagggaagagaaggacatatgatcatcgtacggacgaaagcgttaacggcatattgactagtacatgaccacttga

SEQ ID NO: 43337 - DNA, 76 bp, Artificial Sequence
  Description of Artificial Sequence: Synthetic gluten; 5' sequence + inner sequence + 3'  sequence
tagggaagagaaggacatatgatggccacgatgaacctacaggtgatcatgtattgactagtacatgaccacttga

SEQ ID NO: 43338 - DNA, 76 bp, Artificial Sequence
  Description of Artificial Sequence: Synthetic gluten; 5' sequence + inner sequence + 3'  sequence
tagggaagagaaggacatatgatggcctgatcgcacctagagagtggcgtggattgactagtacatgaccacttga

SEQ ID NO: 43339 - DNA, 76 bp, Artificial Sequence
  Description of Artificial Sequence: Synthetic gluten; 5' sequence + inner sequence + 3'  sequence
tagggaagagaaggacatatgatgaccgccactccctagcaagcgcgaatgtattgactagtacatgaccacttga

SEQ ID NO: 43340 - DNA, 76 bp, Artificial Sequence
  Description of Artificial Sequence: Synthetic gluten; 5' sequence + inner sequence + 3'  sequence
tagggaagagaaggacatatgatcatgactaaccatctgacggacagttcatattgactagtacatgaccacttga

SEQ ID NO: 43341 - DNA, 76 bp, Artificial Sequence
  Description of Artificial Sequence: Synthetic gluten; 5' sequence + inner sequence + 3'  sequence
tagggaagagaaggacatatgatgagttcgcgatccttcaagtgcagcatggattgactagtacatgaccacttga

SEQ ID NO: 43342 - DNA, 76 bp, Artificial Sequence
  Description of Artificial Sequence: Synthetic gluten; 5' sequence + inner sequence + 3'  sequence
tagggaagagaaggacatatgattcaatatcggcactcgcatgaaagttccgtttgactagtacatgaccacttga

SEQ ID NO: 43343 - DNA, 76 bp, Artificial Sequence
  Description of Artificial Sequence: Synthetic gluten; 5' sequence + inner sequence + 3'  sequence
tagggaagagaaggacatatgatggccgaaagctaagctagttaatggacacattgactagtacatgaccacttga

SEQ ID NO: 43344 - DNA, 76 bp, Artificial Sequence; identical to SEQ ID NO: 3021
  Description of Artificial Sequence: Synthetic gluten; 5' sequence + inner sequence + 3'  sequence

SEQ ID NO: 43345 - DNA, 76 bp, Artificial Sequence
  Description of Artificial Sequence: Synthetic gluten; 5' sequence + inner sequence + 3'  sequence
tagggaagagaaggacatatgatggccgaacgacatgatgcgtatggaaagtattgactagtacatgaccacttga

SEQ ID NO: 43346 - DNA, 76 bp, Artificial Sequence
  Description of Artificial Sequence: Synthetic gluten; 5' sequence + inner sequence + 3'  sequence
tagggaagagaaggacatatgatgtcatgcgcggacattcaagttggcgcggattgactagtacatgaccacttga

SEQ ID NO: 43347 - DNA, 76 bp, Artificial Sequence
  Description of Artificial Sequence: Synthetic gluten; 5' sequence + inner sequence + 3'  sequence
tagggaagagaaggacatatgatcctgagcgcacccaacaatggcatggcgaattgactagtacatgaccacttga

SEQ ID NO: 43348 - DNA, 76 bp, Artificial Sequence
  Description of Artificial Sequence: Synthetic gluten; 5' sequence + inner sequence + 3'  sequence
tagggaagagaaggacatatgatggacggagcgaccgaaatggctagtcacgtttgactagtacatgaccacttga

SEQ ID NO: 43349 - DNA, 76 bp, Artificial Sequence
  Description of Artificial Sequence: Synthetic gluten; 5' sequence + inner sequence + 3'  sequence
tagggaagagaaggacatatgattggaacgccgaataaaaggtgagatcgtgcttgactagtacatgaccacttga

SEQ ID NO: 43350 - DNA, 76 bp, Artificial Sequence; identical to SEQ ID NO: 3567
  Description of Artificial Sequence: Synthetic gluten; 5' sequence + inner sequence + 3'  sequence

SEQ ID NO: 43351 - DNA, 76 bp, Artificial Sequence
  Description of Artificial Sequence: Synthetic gluten; 5' sequence + inner sequence + 3'  sequence
tagggaagagaaggacatatgatggcctgatcgaacctcgagagtggcgtggattgactagtacatgaccacttga

SEQ ID NO: 43352 - DNA, 75 bp, Artificial Sequence
  Description of Artificial Sequence: Synthetic gluten; 5' sequence + inner sequence + 3'  sequence
tagggaagagaaggacatatgatcatacagccgcagtttcggaccttcagccttgactagtacatgaccacttga

SEQ ID NO: 43353 - DNA, 76 bp, Artificial Sequence
  Description of Artificial Sequence: Synthetic gluten; 5' sequence + inner sequence + 3'  sequence
tagggaagagaaggacatatgatccgactcgaccaaagtaggagtgtacgtgtttgactagtacatgaccacttga

SEQ ID NO: 43354 - DNA, 76 bp, Artificial Sequence
  Description of Artificial Sequence: Synthetic gluten; 5' sequence + inner sequence + 3'  sequence
tagggaagagaaggacatatgatcgacacgacgtatcgttagcttcgcggtcattgactagtacatgaccacttga

SEQ ID NO: 43355 - DNA, 76 bp, Artificial Sequence; identical to SEQ ID NO: 31295
  Description of Artificial Sequence: Synthetic gluten; 5' sequence + inner sequence + 3'  sequence

SEQ ID NO: 43356 - DNA, 71 bp, Artificial Sequence
  Description of Artificial Sequence: Synthetic gluten; 5' sequence + inner sequence + 3'  sequence
tagggaagagaaggacatatgatggccgacgatggatgtgagcatgtattgactagtacatgaccacttga

SEQ ID NO: 43357 - DNA, 76 bp, Artificial Sequence; identical to SEQ ID NO: 3813
  Description of Artificial Sequence: Synthetic gluten; 5' sequence + inner sequence + 3'  sequence

SEQ ID NO: 43358 - DNA, 76 bp, Artificial Sequence; identical to SEQ ID NO: 3783
  Description of Artificial Sequence: Synthetic gluten; 5' sequence + inner sequence + 3'  sequence

SEQ ID NO: 43359 - DNA, 76 bp, Artificial Sequence
  Description of Artificial Sequence: Synthetic gluten; 5' sequence + inner sequence + 3'  sequence
tagggaagagaaggacatatgatcgcgcctatcaacgtgccaggtacgacgaattgactagtacatgaccacttga

SEQ ID NO: 43360 - DNA, 76 bp, Artificial Sequence
  Description of Artificial Sequence: Synthetic gluten; 5' sequence + inner sequence + 3'  sequence
tagggaagagaaggacatatgatggcctgaactggatgtgcggaaggtacgagttgactagtacatgaccacttga

SEQ ID NO: 43361 - DNA, 76 bp, Artificial Sequence
  Description of Artificial Sequence: Synthetic gluten; 5' sequence + inner sequence + 3'  sequence
tagggaagagaaggacatatgatcattcacatggccgtcgatggatctgggcattgactagtacatgaccacttga

SEQ ID NO: 43362 - DNA, 76 bp, Artificial Sequence
  Description of Artificial Sequence: Synthetic gluten; 5' sequence + inner sequence + 3'  sequence
tagggaagagaaggacatatgattggccgaacttccctaaagaccagcactagttgactagtacatgaccacttga

SEQ ID NO: 43363 - DNA, 76 bp, Artificial Sequence
  Description of Artificial Sequence: Synthetic gluten; 5' sequence + inner sequence + 3'  sequence
tagggaagagaaggacatatgatggacgacgcgagctagcaaggaggcgtgtattgactagtacatgaccacttga

SEQ ID NO: 43364 - DNA, 76 bp, Artificial Sequence
  Description of Artificial Sequence: Synthetic gluten; 5' sequence + inner sequence + 3'  sequence
tagggaagagaaggacatatgatggccgacgaagaccttaaagtgatcgtgtattgactagtacatgaccacttga

SEQ ID NO: 43365 - DNA, 76 bp, Artificial Sequence
  Description of Artificial Sequence: Synthetic gluten; 5' sequence + inner sequence + 3'  sequence
tagggaagagaaggacatatgatgtcatgcgcggacattcaaggtggcgtggattgactagtacatgaccacttga

SEQ ID NO: 43366 - DNA, 76 bp, Artificial Sequence
  Description of Artificial Sequence: Synthetic gluten; 5' sequence + inner sequence + 3'  sequence
tagggaagagaaggacatatgatcatgacggaacgtagctcggcagagtcatattgactagtacatgaccacttga

SEQ ID NO: 43367 - DNA, 76 bp, Artificial Sequence
  Description of Artificial Sequence: Synthetic gluten; 5' sequence + inner sequence + 3'  sequence
tagggaagagaaggacatatgatgcccgagcgaacctagcatgtgggatcgtattgactagtacatgaccacttga

SEQ ID NO: 43368 - DNA, 77 bp, Artificial Sequence; identical to SEQ ID NO: 3503
  Description of Artificial Sequence: Synthetic gluten; 5' sequence + inner sequence + 3'  sequence

SEQ ID NO: 43369 - DNA, 76 bp, Artificial Sequence
  Description of Artificial Sequence: Synthetic gluten; 5' sequence + inner sequence + 3'  sequence
tagggaagagaaggacatatgatggcatgcgatggatgtggaaatgcgacgtcttgactagtacatgaccacttga

SEQ ID NO: 43370 - DNA, 76 bp, Artificial Sequence; identical to SEQ ID NO: 3288
  Description of Artificial Sequence: Synthetic gluten; 5' sequence + inner sequence + 3'  sequence

SEQ ID NO: 43371 - DNA, 76 bp, Artificial Sequence
  Description of Artificial Sequence: Synthetic gluten; 5' sequence + inner sequence + 3'  sequence
tagggaagagaaggacatatgatcaaactgacagggcaaagctatgtctcaccttgactagtacatgaccacttga

SEQ ID NO: 43372 - DNA, 76 bp, Artificial Sequence
  Description of Artificial Sequence: Synthetic gluten; 5' sequence + inner sequence + 3'  sequence
tagggaagagaaggacatatgatgtacgtctcggatgaggtcttgaacgcggtttgactagtacatgaccacttga

SEQ ID NO: 43373 - DNA, 76 bp, Artificial Sequence
  Description of Artificial Sequence: Synthetic gluten; 5' sequence + inner sequence + 3'  sequence
tagggaagagaaggacatatgatccgttgatgaccaagagcatgaacgaggcattgactagtacatgaccacttga

SEQ ID NO: 43374 - DNA, 76 bp, Artificial Sequence
  Description of Artificial Sequence: Synthetic gluten; 5' sequence + inner sequence + 3'  sequence
tagggaagagaaggacatatgatttgagccgaagacacccctacgatcttgggttgactagtacatgaccacttga

SEQ ID NO: 43375 - DNA, 76 bp, Artificial Sequence
  Description of Artificial Sequence: Synthetic gluten; 5' sequence + inner sequence + 3'  sequence
tagggaagagaaggacatatgattggtcgcactcttcacgtcacaagcggacattgactagtacatgaccacttga

SEQ ID NO: 43376 - DNA, 76 bp, Artificial Sequence
  Description of Artificial Sequence: Synthetic gluten; 5' sequence + inner sequence + 3'  sequence
tagggaagagaaggacatatgatggcctgaaaagcgagaaggagcctacaaggttgactagtacatgaccacttga

SEQ ID NO: 43377 - DNA, 76 bp, Artificial Sequence
  Description of Artificial Sequence: Synthetic gluten; 5' sequence + inner sequence + 3'  sequence
tagggaagagaaggacatatgatgccacagcgacctcaagtaggctggacgtattgactagtacatgaccacttga

SEQ ID NO: 43378 - DNA, 76 bp, Artificial Sequence; identical to SEQ ID NO: 3529
  Description of Artificial Sequence: Synthetic gluten; 5' sequence + inner sequence + 3'  sequence

SEQ ID NO: 43379 - DNA, 76 bp, Artificial Sequence; identical to SEQ ID NO: 3504
  Description of Artificial Sequence: Synthetic gluten; 5' sequence + inner sequence + 3'  sequence

SEQ ID NO: 43380 - DNA, 76 bp, Artificial Sequence; identical to SEQ ID NO: 7406
  Description of Artificial Sequence: Synthetic gluten; 5' sequence + inner sequence + 3'  sequence

SEQ ID NO: 43381 - DNA, 76 bp, Artificial Sequence
  Description of Artificial Sequence: Synthetic gluten; 5' sequence + inner sequence + 3'  sequence
tagggaagagaaggacatatgatgacgctaggaggcctaaatgcgtgaacatattgactagtacatgaccacttga

SEQ ID NO: 43382 - DNA, 76 bp, Artificial Sequence
  Description of Artificial Sequence: Synthetic gluten; 5' sequence + inner sequence + 3'  sequence
tagggaagagaaggacatatgatggcattcgatgcactacaagctgttgtgtattgactagtacatgaccacttga

SEQ ID NO: 43383 - DNA, 76 bp, Artificial Sequence
  Description of Artificial Sequence: Synthetic gluten; 5' sequence + inner sequence + 3'  sequence
tagggaagagaaggacatatgatcatgcatggggagcagtggcttagctgacattgactagtacatgaccacttga

SEQ ID NO: 43384 - DNA, 76 bp, Artificial Sequence
  Description of Artificial Sequence: Synthetic gluten; 5' sequence + inner sequence + 3'  sequence
tagggaagagaaggacatatgatcatgtaccaagagttacgttcaccggcatattgactagtacatgaccacttga

SEQ ID NO: 43385 - DNA, 75 bp, Artificial Sequence
  Description of Artificial Sequence: Synthetic gluten; 5' sequence + inner sequence + 3'  sequence
tagggaagagaaggacatatgatgccctgcgatgaccgaaagtgggttggacttgactagtacatgaccacttga

SEQ ID NO: 43386 - DNA, 76 bp, Artificial Sequence; identical to SEQ ID NO: 3673
  Description of Artificial Sequence: Synthetic gluten; 5' sequence + inner sequence + 3'  sequence

SEQ ID NO: 43387 - DNA, 76 bp, Artificial Sequence
  Description of Artificial Sequence: Synthetic gluten; 5' sequence + inner sequence + 3'  sequence
tagggaagagaaggacatatgatctggccggagagtagctacaaatgtcttcattgactagtacatgaccacttga

SEQ ID NO: 43388 - DNA, 76 bp, Artificial Sequence
  Description of Artificial Sequence: Synthetic gluten; 5' sequence + inner sequence + 3'  sequence
tagggaagagaaggacatatgattcgggccacctacgcatcatcaacacgtggttgactagtacatgaccacttga

SEQ ID NO: 43389 - DNA, 76 bp, Artificial Sequence
  Description of Artificial Sequence: Synthetic gluten; 5' sequence + inner sequence + 3'  sequence
tagggaagagaaggacatatgatggactgcgatggatgaggtgctgcactagtttgactagtacatgaccacttga

SEQ ID NO: 43390 - DNA, 76 bp, Artificial Sequence
  Description of Artificial Sequence: Synthetic gluten; 5' sequence + inner sequence + 3'  sequence
tagggaagagaaggacatatgataatgtggaatgaacgaccaagagcatggatttgactagtacatgaccacttga

SEQ ID NO: 43391 - DNA, 76 bp, Artificial Sequence
  Description of Artificial Sequence: Synthetic gluten; 5' sequence + inner sequence + 3'  sequence
tagggaagagaaggacatatgatggcctgaacaaccgatagaacatggcgtaattgactagtacatgaccacttga

SEQ ID NO: 43392 - DNA, 76 bp, Artificial Sequence
  Description of Artificial Sequence: Synthetic gluten; 5' sequence + inner sequence + 3'  sequence
tagggaagagaaggacatatgatgtcatgcgcggacattcaagatggcgtggattgactagtacatgaccacttga

SEQ ID NO: 43393 - DNA, 76 bp, Artificial Sequence
  Description of Artificial Sequence: Synthetic gluten; 5' sequence + inner sequence + 3'  sequence
tagggaagagaaggacatatgatcttgcatatgaacgcgctctggatgtgggcttgactagtacatgaccacttga

SEQ ID NO: 43394 - DNA, 76 bp, Artificial Sequence
  Description of Artificial Sequence: Synthetic gluten; 5' sequence + inner sequence + 3'  sequence
tagggaagagaaggacatatgatcattacgtacaaagggcgtgcagactcatattgactagtacatgaccacttga

SEQ ID NO: 43395 - DNA, 76 bp, Artificial Sequence
  Description of Artificial Sequence: Synthetic gluten; 5' sequence + inner sequence + 3'  sequence
tagggaagagaaggacatatgatcttccacccaaagtccttcgagccggtgtcttgactagtacatgaccacttga

SEQ ID NO: 43396 - DNA, 76 bp, Artificial Sequence
  Description of Artificial Sequence: Synthetic gluten; 5' sequence + inner sequence + 3'  sequence
tagggaagagaaggacatatgatggcctcgaagcccttcaagcggttcatggattgactagtacatgaccacttga

SEQ ID NO: 43397 - DNA, 76 bp, Artificial Sequence
  Description of Artificial Sequence: Synthetic gluten; 5' sequence + inner sequence + 3'  sequence
tagggaagagaaggacatatgatgtgctgagcttccctaagagtgcttgcgcattgactagtacatgaccacttga

SEQ ID NO: 43398 - DNA, 76 bp, Artificial Sequence
  Description of Artificial Sequence: Synthetic gluten; 5' sequence + inner sequence + 3'  sequence
tagggaagagaaggacatatgattgaccgactcgaaccaggcatgactcggcattgactagtacatgaccacttga

SEQ ID NO: 43399 - DNA, 76 bp, Artificial Sequence
  Description of Artificial Sequence: Synthetic gluten; 5' sequence + inner sequence + 3'  sequence
tagggaagagaaggacatatgattggacgacgattcccttggcaagctccgctttgactagtacatgaccacttga

SEQ ID NO: 43400 - DNA, 76 bp, Artificial Sequence
  Description of Artificial Sequence: Synthetic gluten; 5' sequence + inner sequence + 3'  sequence
tagggaagagaaggacatatgatggactcgcgtcactatcacgggggcaggtattgactagtacatgaccacttga

SEQ ID NO: 43401 - DNA, 77 bp, Artificial Sequence
  Description of Artificial Sequence: Synthetic gluten; 5' sequence + inner sequence + 3'  sequence
tagggaagagaaggacatatgatgtacgacgcgaacctatcaagggctcatggattgactagtacatgaccacttga

SEQ ID NO: 43402 - DNA, 76 bp, Artificial Sequence
  Description of Artificial Sequence: Synthetic gluten; 5' sequence + inner sequence + 3'  sequence
tagggaagagaaggacatatgattcgcgatgaccgaggaaatgtacgacggcattgactagtacatgaccacttga

SEQ ID NO: 43403 - DNA, 76 bp, Artificial Sequence
  Description of Artificial Sequence: Synthetic gluten; 5' sequence + inner sequence + 3'  sequence
tagggaagagaaggacatatgatggcatgatcgaaccgctagtgtgtcagggattgactagtacatgaccacttga

SEQ ID NO: 43404 - DNA, 75 bp, Artificial Sequence
  Description of Artificial Sequence: Synthetic gluten; 5' sequence + inner sequence + 3'  sequence
tagggaagagaaggacatatgatggcatgcgatggatgtggctggtgcttgcttgactagtacatgaccacttga

SEQ ID NO: 43405 - DNA, 76 bp, Artificial Sequence
  Description of Artificial Sequence: Synthetic gluten; 5' sequence + inner sequence + 3'  sequence
tagggaagagaaggacatatgatggcattcgatgcactacaagttgttgcgtattgactagtacatgaccacttga

SEQ ID NO: 43406 - DNA, 76 bp, Artificial Sequence
  Description of Artificial Sequence: Synthetic gluten; 5' sequence + inner sequence + 3'  sequence
tagggaagagaaggacatatgatccgactcgacctgaatgtaataggagtgaattgactagtacatgaccacttga

SEQ ID NO: 43407 - DNA, 76 bp, Artificial Sequence
  Description of Artificial Sequence: Synthetic gluten; 5' sequence + inner sequence + 3'  sequence
tagggaagagaaggacatatgattggcacacaagcatatcgcacttatctggattgactagtacatgaccacttga

SEQ ID NO: 43408 - DNA, 76 bp, Artificial Sequence
  Description of Artificial Sequence: Synthetic gluten; 5' sequence + inner sequence + 3'  sequence
tagggaagagaaggacatatgatctgacctagcaactgtggcacgcaatttgattgactagtacatgaccacttga

SEQ ID NO: 43409 - DNA, 76 bp, Artificial Sequence
  Description of Artificial Sequence: Synthetic gluten; 5' sequence + inner sequence + 3'  sequence
tagggaagagaaggacatatgatcatgtacccacgatagtcctgaggagcatattgactagtacatgaccacttga

SEQ ID NO: 43410 - DNA, 76 bp, Artificial Sequence
  Description of Artificial Sequence: Synthetic gluten; 5' sequence + inner sequence + 3'  sequence
tagggaagagaaggacatatgatcatatggacgccgatgaactagtacgggcattgactagtacatgaccacttga

SEQ ID NO: 43411 - DNA, 76 bp, Artificial Sequence
  Description of Artificial Sequence: Synthetic gluten; 5' sequence + inner sequence + 3'  sequence
tagggaagagaaggacatatgatgtacgacactgcaccttcaagtgtgatgtattgactagtacatgaccacttga

SEQ ID NO: 43412 - DNA, 76 bp, Artificial Sequence; identical to SEQ ID NO: 7598
  Description of Artificial Sequence: Synthetic gluten; 5' sequence + inner sequence + 3'  sequence

SEQ ID NO: 43413 - DNA, 76 bp, Artificial Sequence; identical to SEQ ID NO: 7555
  Description of Artificial Sequence: Synthetic gluten; 5' sequence + inner sequence + 3'  sequence

SEQ ID NO: 43414 - DNA, 76 bp, Artificial Sequence
  Description of Artificial Sequence: Synthetic gluten; 5' sequence + inner sequence + 3'  sequence
tagggaagagaaggacatatgatgacctgatcgaacctagagagtggcgtggattgactagtacatgaccacttga

SEQ ID NO: 43415 - DNA, 76 bp, Artificial Sequence
  Description of Artificial Sequence: Synthetic gluten; 5' sequence + inner sequence + 3'  sequence
tagggaagagaaggacatatgatggacgaactgaactaaagtggggtacgacgttgactagtacatgaccacttga

SEQ ID NO: 43416 - DNA, 76 bp, Artificial Sequence
  Description of Artificial Sequence: Synthetic gluten; 5' sequence + inner sequence + 3'  sequence
tagggaagagaaggacatatgatcctgagctgcactaggacggcaattccaaattgactagtacatgaccacttga

SEQ ID NO: 43417 - DNA, 76 bp, Artificial Sequence
  Description of Artificial Sequence: Synthetic gluten; 5' sequence + inner sequence + 3'  sequence
tagggaagagaaggacatatgatcatgtacgctcataaaggctcgcactcatattgactagtacatgaccacttga

SEQ ID NO: 43418 - DNA, 76 bp, Artificial Sequence
  Description of Artificial Sequence: Synthetic gluten; 5' sequence + inner sequence + 3'  sequence
tagggaagagaaggacatatgatccgtacgattcgctgcaatgtgctcatggattgactagtacatgaccacttga

SEQ ID NO: 43419 - DNA, 76 bp, Artificial Sequence; identical to SEQ ID NO: 3112
  Description of Artificial Sequence: Synthetic gluten; 5' sequence + inner sequence + 3'  sequence

SEQ ID NO: 43420 - DNA, 75 bp, Artificial Sequence
  Description of Artificial Sequence: Synthetic gluten; 5' sequence + inner sequence + 3'  sequence
tagggaagagaaggacatatgatttcgcagaaagcacgtgatcaacgcgcacttgactagtacatgaccacttga

SEQ ID NO: 43421 - DNA, 76 bp, Artificial Sequence
  Description of Artificial Sequence: Synthetic gluten; 5' sequence + inner sequence + 3'  sequence
tagggaagagaaggacatatgatcgaccctgttgagagccgaagatctgcaatttgactagtacatgaccacttga

SEQ ID NO: 43422 - DNA, 76 bp, Artificial Sequence
  Description of Artificial Sequence: Synthetic gluten; 5' sequence + inner sequence + 3'  sequence
tagggaagagaaggacatatgatgcacgacgatgactgaaagtgtccatgtgcttgactagtacatgaccacttga

SEQ ID NO: 43423 - DNA, 76 bp, Artificial Sequence
  Description of Artificial Sequence: Synthetic gluten; 5' sequence + inner sequence + 3'  sequence
tagggaagagaaggacatatgattcatatggccaatgacgccctgtacgtgtcttgactagtacatgaccacttga

SEQ ID NO: 43424 - DNA, 76 bp, Artificial Sequence
  Description of Artificial Sequence: Synthetic gluten; 5' sequence + inner sequence + 3'  sequence
tagggaagagaaggacatatgatggcctgaacgcgcctatcaatgcgtctgtattgactagtacatgaccacttga

SEQ ID NO: 43425 - DNA, 76 bp, Artificial Sequence
  Description of Artificial Sequence: Synthetic gluten; 5' sequence + inner sequence + 3'  sequence
tagggaagagaaggacatatgattgaagtgacacaagagccgaagatacagtattgactagtacatgaccacttga

SEQ ID NO: 43426 - DNA, 76 bp, Artificial Sequence
  Description of Artificial Sequence: Synthetic gluten; 5' sequence + inner sequence + 3'  sequence
tagggaagagaaggacatatgatgtactgctctggcacgaagatgctgcgtcattgactagtacatgaccacttga

SEQ ID NO: 43427 - DNA, 76 bp, Artificial Sequence
  Description of Artificial Sequence: Synthetic gluten; 5' sequence + inner sequence + 3'  sequence
tagggaagagaaggacatatgatgtgctgcgatgaccgatgaaggcactaggcttgactagtacatgaccacttga

SEQ ID NO: 43428 - DNA, 76 bp, Artificial Sequence
  Description of Artificial Sequence: Synthetic gluten; 5' sequence + inner sequence + 3'  sequence
tagggaagagaaggacatatgatggccaccctcatcccttgggcatgcacgacttgactagtacatgaccacttga

SEQ ID NO: 43429 - DNA, 76 bp, Artificial Sequence
  Description of Artificial Sequence: Synthetic gluten; 5' sequence + inner sequence + 3'  sequence
tagggaagagaaggacatatgatgactgaacggaaacaagtggaagtggcgtcttgactagtacatgaccacttga

SEQ ID NO: 43430 - DNA, 76 bp, Artificial Sequence
  Description of Artificial Sequence: Synthetic gluten; 5' sequence + inner sequence + 3'  sequence
tagggaagagaaggacatatgatcgtcatgccatagaaatcgtggaccgtgccttgactagtacatgaccacttga

SEQ ID NO: 43431 - DNA, 76 bp, Artificial Sequence
  Description of Artificial Sequence: Synthetic gluten; 5' sequence + inner sequence + 3'  sequence
tagggaagagaaggacatatgatgtcatgccgtcccgtacaagtcgtcagggattgactagtacatgaccacttga

SEQ ID NO: 43432 - DNA, 76 bp, Artificial Sequence
  Description of Artificial Sequence: Synthetic gluten; 5' sequence + inner sequence + 3'  sequence
tagggaagagaaggacatatgattggactcgctgaacctaccaagaacatgtcttgactagtacatgaccacttga

SEQ ID NO: 43433 - DNA, 76 bp, Artificial Sequence
  Description of Artificial Sequence: Synthetic gluten; 5' sequence + inner sequence + 3'  sequence
tagggaagagaaggacatatgattgtccgaagcaaccggcaatggacgacgtcttgactagtacatgaccacttga

SEQ ID NO: 43434 - DNA, 76 bp, Artificial Sequence
  Description of Artificial Sequence: Synthetic gluten; 5' sequence + inner sequence + 3'  sequence
tagggaagagaaggacatatgatgtacgacgcggaccttcaagtaggcgtggattgactagtacatgaccacttga

SEQ ID NO: 43435 - DNA, 77 bp, Artificial Sequence
  Description of Artificial Sequence: Synthetic gluten; 5' sequence + inner sequence + 3'  sequence
tagggaagagaaggacatatgatgtacgacgcggacctgtcatggatgggcacattgactagtacatgaccacttga

SEQ ID NO: 43436 - DNA, 76 bp, Artificial Sequence
  Description of Artificial Sequence: Synthetic gluten; 5' sequence + inner sequence + 3'  sequence
tagggaagagaaggacatatgatgtcatgctcggatgtgggctttacggtccattgactagtacatgaccacttga

SEQ ID NO: 43437 - DNA, 76 bp, Artificial Sequence
  Description of Artificial Sequence: Synthetic gluten; 5' sequence + inner sequence + 3'  sequence
tagggaagagaaggacatatgatatcatcaggtggacgaatcggaacgtgggattgactagtacatgaccacttga

SEQ ID NO: 43438 - DNA, 75 bp, Artificial Sequence
  Description of Artificial Sequence: Synthetic gluten; 5' sequence + inner sequence + 3'  sequence
tagggaagagaaggacatatgatgtacgcagctgacctcaagtgctcgtggcttgactagtacatgaccacttga

SEQ ID NO: 43439 - DNA, 76 bp, Artificial Sequence
  Description of Artificial Sequence: Synthetic gluten; 5' sequence + inner sequence + 3'  sequence
tagggaagagaaggacatatgatggcccgagctggatgtggcttgaacgtgtcttgactagtacatgaccacttga

SEQ ID NO: 43440 - DNA, 76 bp, Artificial Sequence
  Description of Artificial Sequence: Synthetic gluten; 5' sequence + inner sequence + 3'  sequence
tagggaagagaaggacatatgattcatgtccgtcacgcagcatcaagtgcgaattgactagtacatgaccacttga

SEQ ID NO: 43441 - DNA, 76 bp, Artificial Sequence
  Description of Artificial Sequence: Synthetic gluten; 5' sequence + inner sequence + 3'  sequence
tagggaagagaaggacatatgatcctgcgaagccctgtagaccatgcacgtgcttgactagtacatgaccacttga

SEQ ID NO: 43442 - DNA, 76 bp, Artificial Sequence
  Description of Artificial Sequence: Synthetic gluten; 5' sequence + inner sequence + 3'  sequence
tagggaagagaaggacatatgatcaacatagctgccgaacggaatgactcacgttgactagtacatgaccacttga

SEQ ID NO: 43443 - DNA, 76 bp, Artificial Sequence; identical to SEQ ID NO: 7801
  Description of Artificial Sequence: Synthetic gluten; 5' sequence + inner sequence + 3'  sequence

SEQ ID NO: 43444 - DNA, 76 bp, Artificial Sequence
  Description of Artificial Sequence: Synthetic gluten; 5' sequence + inner sequence + 3'  sequence
tagggaagagaaggacatatgatggcctgagctgaccgaatgtgcgcgctgtcttgactagtacatgaccacttga

SEQ ID NO: 43445 - DNA, 76 bp, Artificial Sequence
  Description of Artificial Sequence: Synthetic gluten; 5' sequence + inner sequence + 3'  sequence
tagggaagagaaggacatatgattggccgagcgaaccgaagtactgtcagacattgactagtacatgaccacttga

SEQ ID NO: 43446 - DNA, 76 bp, Artificial Sequence; identical to SEQ ID NO: 31922
  Description of Artificial Sequence: Synthetic gluten; 5' sequence + inner sequence + 3'  sequence

SEQ ID NO: 43447 - DNA, 76 bp, Artificial Sequence
  Description of Artificial Sequence: Synthetic gluten; 5' sequence + inner sequence + 3'  sequence
tagggaagagaaggacatatgatcatgtacagatcgaagcgaatctcggcatattgactagtacatgaccacttga

SEQ ID NO: 43448 - DNA, 76 bp, Artificial Sequence
  Description of Artificial Sequence: Synthetic gluten; 5' sequence + inner sequence + 3'  sequence
tagggaagagaaggacatatgatacagatgcacgacgacttccctaattggcattgactagtacatgaccacttga

SEQ ID NO: 43449 - DNA, 76 bp, Artificial Sequence
  Description of Artificial Sequence: Synthetic gluten; 5' sequence + inner sequence + 3'  sequence
tagggaagagaaggacatatgatgcaccacgtgctagcaatggaccgactggattgactagtacatgaccacttga

SEQ ID NO: 43450 - DNA, 76 bp, Artificial Sequence
  Description of Artificial Sequence: Synthetic gluten; 5' sequence + inner sequence + 3'  sequence
tagggaagagaaggacatatgataatgtgcccggatcggaacgtggccatgtattgactagtacatgaccacttga

SEQ ID NO: 43451 - DNA, 76 bp, Artificial Sequence
  Description of Artificial Sequence: Synthetic gluten; 5' sequence + inner sequence + 3'  sequence
tagggaagagaaggacatatgatcaactcacgtgcctcggcttgctcatttagttgactagtacatgaccacttga

SEQ ID NO: 43452 - DNA, 75 bp, Artificial Sequence
  Description of Artificial Sequence: Synthetic gluten; 5' sequence + inner sequence + 3'  sequence
tagggaagagaaggacatatgatggccgagcttcccttaagatcaggcacacttgactagtacatgaccacttga

SEQ ID NO: 43453 - DNA, 76 bp, Artificial Sequence
  Description of Artificial Sequence: Synthetic gluten; 5' sequence + inner sequence + 3'  sequence
tagggaagagaaggacatatgatcctgcgatgactaacggaataggcaacatgttgactagtacatgaccacttga

SEQ ID NO: 43454 - DNA, 76 bp, Artificial Sequence
  Description of Artificial Sequence: Synthetic gluten; 5' sequence + inner sequence + 3'  sequence
tagggaagagaaggacatatgatagaaccagcctgaaggagcgagtgtacgagttgactagtacatgaccacttga

SEQ ID NO: 43455 - DNA, 76 bp, Artificial Sequence
  Description of Artificial Sequence: Synthetic gluten; 5' sequence + inner sequence + 3'  sequence
tagggaagagaaggacatatgatcatgatcgcaccgaatagatcaggtacgtattgactagtacatgaccacttga

SEQ ID NO: 43456 - DNA, 76 bp, Artificial Sequence
  Description of Artificial Sequence: Synthetic gluten; 5' sequence + inner sequence + 3'  sequence
tagggaagagaaggacatatgatcgcaacgcagaaacgtataagggtggatcgttgactagtacatgaccacttga

SEQ ID NO: 43457 - DNA, 76 bp, Artificial Sequence
  Description of Artificial Sequence: Synthetic gluten; 5' sequence + inner sequence + 3'  sequence
tagggaagagaaggacatatgatcatggcggatacagctggaagacaggcatattgactagtacatgaccacttga

SEQ ID NO: 43458 - DNA, 76 bp, Artificial Sequence
  Description of Artificial Sequence: Synthetic gluten; 5' sequence + inner sequence + 3'  sequence
tagggaagagaaggacatatgatcggaacgagcatatcaaacacgtggtggttttgactagtacatgaccacttga

SEQ ID NO: 43459 - DNA, 76 bp, Artificial Sequence
  Description of Artificial Sequence: Synthetic gluten; 5' sequence + inner sequence + 3'  sequence
tagggaagagaaggacatatgatcctgctcggacctatcatggacggcattcattgactagtacatgaccacttga

SEQ ID NO: 43460 - DNA, 76 bp, Artificial Sequence
  Description of Artificial Sequence: Synthetic gluten; 5' sequence + inner sequence + 3'  sequence
tagggaagagaaggacatatgatcatggacgtaactaagcaaacttggccatattgactagtacatgaccacttga

SEQ ID NO: 43461 - DNA, 76 bp, Artificial Sequence
  Description of Artificial Sequence: Synthetic gluten; 5' sequence + inner sequence + 3'  sequence
tagggaagagaaggacatatgatgtcaagagcgacccttcatgaggacatggattgactagtacatgaccacttga

SEQ ID NO: 43462 - DNA, 76 bp, Artificial Sequence
  Description of Artificial Sequence: Synthetic gluten; 5' sequence + inner sequence + 3'  sequence
tagggaagagaaggacatatgatcatgtacgaaacaaggactgggtctcattattgactagtacatgaccacttga

SEQ ID NO: 43463 - DNA, 76 bp, Artificial Sequence
  Description of Artificial Sequence: Synthetic gluten; 5' sequence + inner sequence + 3'  sequence
tagggaagagaaggacatatgatgtccatagcttgccttcaagggagcgtggattgactagtacatgaccacttga

SEQ ID NO: 43464 - DNA, 76 bp, Artificial Sequence
  Description of Artificial Sequence: Synthetic gluten; 5' sequence + inner sequence + 3'  sequence
tagggaagagaaggacatatgataggatgcacgaacttccctacatgtggacattgactagtacatgaccacttga

SEQ ID NO: 43465 - DNA, 76 bp, Artificial Sequence; identical to SEQ ID NO: 3201
  Description of Artificial Sequence: Synthetic gluten; 5' sequence + inner sequence + 3'  sequence

SEQ ID NO: 43466 - DNA, 76 bp, Artificial Sequence
  Description of Artificial Sequence: Synthetic gluten; 5' sequence + inner sequence + 3'  sequence
tagggaagagaaggacatatgatcatgtcgttagaaagcatcccaatgtcatattgactagtacatgaccacttga

SEQ ID NO: 43467 - DNA, 76 bp, Artificial Sequence
  Description of Artificial Sequence: Synthetic gluten; 5' sequence + inner sequence + 3'  sequence
tagggaagagaaggacatatgatcatgtgcgattcgacgtgcatccgttcatattgactagtacatgaccacttga

SEQ ID NO: 43468 - DNA, 76 bp, Artificial Sequence; identical to SEQ ID NO: 3161
  Description of Artificial Sequence: Synthetic gluten; 5' sequence + inner sequence + 3'  sequence

SEQ ID NO: 43469 - DNA, 76 bp, Artificial Sequence
  Description of Artificial Sequence: Synthetic gluten; 5' sequence + inner sequence + 3'  sequence
tagggaagagaaggacatatgatggccgaatcgaacctaggacatgtcgcgtattgactagtacatgaccacttga

SEQ ID NO: 43470 - DNA, 76 bp, Artificial Sequence; identical to SEQ ID NO: 3472
  Description of Artificial Sequence: Synthetic gluten; 5' sequence + inner sequence + 3'  sequence

SEQ ID NO: 43471 - DNA, 76 bp, Artificial Sequence; identical to SEQ ID NO: 31472
  Description of Artificial Sequence: Synthetic gluten; 5' sequence + inner sequence + 3'  sequence

SEQ ID NO: 43472 - DNA, 76 bp, Artificial Sequence
  Description of Artificial Sequence: Synthetic gluten; 5' sequence + inner sequence + 3'  sequence
tagggaagagaaggacatatgatcttcccacaagctggtaggggacgaggccattgactagtacatgaccacttga

SEQ ID NO: 43473 - DNA, 75 bp, Artificial Sequence
  Description of Artificial Sequence: Synthetic gluten; 5' sequence + inner sequence + 3'  sequence
tagggaagagaaggacatatgatggcctgcgatggatgtggcatgctctggcttgactagtacatgaccacttga

SEQ ID NO: 43474 - DNA, 76 bp, Artificial Sequence; identical to SEQ ID NO: 3106
  Description of Artificial Sequence: Synthetic gluten; 5' sequence + inner sequence + 3'  sequence

SEQ ID NO: 43475 - DNA, 76 bp, Artificial Sequence; identical to SEQ ID NO: 3245
  Description of Artificial Sequence: Synthetic gluten; 5' sequence + inner sequence + 3'  sequence

SEQ ID NO: 43476 - DNA, 76 bp, Artificial Sequence
  Description of Artificial Sequence: Synthetic gluten; 5' sequence + inner sequence + 3'  sequence
tagggaagagaaggacatatgatgcatatgcactgcgcgaccctcaagtgacattgactagtacatgaccacttga

SEQ ID NO: 43477 - DNA, 76 bp, Artificial Sequence
  Description of Artificial Sequence: Synthetic gluten; 5' sequence + inner sequence + 3'  sequence
tagggaagagaaggacatatgatggcatgagctgcctacaagatggggatgtattgactagtacatgaccacttga

SEQ ID NO: 43478 - DNA, 76 bp, Artificial Sequence; identical to SEQ ID NO: 3046
  Description of Artificial Sequence: Synthetic gluten; 5' sequence + inner sequence + 3'  sequence

SEQ ID NO: 43479 - DNA, 76 bp, Artificial Sequence
  Description of Artificial Sequence: Synthetic gluten; 5' sequence + inner sequence + 3'  sequence
tagggaagagaaggacatatgatacgtatcgaacctagcgagtgtgtcgtggattgactagtacatgaccacttga

SEQ ID NO: 43480 - DNA, 77 bp, Artificial Sequence
  Description of Artificial Sequence: Synthetic gluten; 5' sequence + inner sequence + 3'  sequence
tagggaagagaaggacatatgattgtactgagcggatgtggactgcacgtaggcttgactagtacatgaccacttga

SEQ ID NO: 43481 - DNA, 76 bp, Artificial Sequence; identical to SEQ ID NO: 3321
  Description of Artificial Sequence: Synthetic gluten; 5' sequence + inner sequence + 3'  sequence

SEQ ID NO: 43482 - DNA, 76 bp, Artificial Sequence; identical to SEQ ID NO: 3186
  Description of Artificial Sequence: Synthetic gluten; 5' sequence + inner sequence + 3'  sequence

SEQ ID NO: 43483 - DNA, 76 bp, Artificial Sequence; identical to SEQ ID NO: 39643
  Description of Artificial Sequence: Synthetic gluten; 5' sequence + inner sequence + 3'  sequence

SEQ ID NO: 43484 - DNA, 76 bp, Artificial Sequence; identical to SEQ ID NO: 3401
  Description of Artificial Sequence: Synthetic gluten; 5' sequence + inner sequence + 3'  sequence

SEQ ID NO: 43485 - DNA, 76 bp, Artificial Sequence
  Description of Artificial Sequence: Synthetic gluten; 5' sequence + inner sequence + 3'  sequence
tagggaagagaaggacatatgatgctccgaacgacccttgtagtgtcaatccattgactagtacatgaccacttga

SEQ ID NO: 43486 - DNA, 76 bp, Artificial Sequence; identical to SEQ ID NO: 3611
  Description of Artificial Sequence: Synthetic gluten; 5' sequence + inner sequence + 3'  sequence

SEQ ID NO: 43487 - DNA, 76 bp, Artificial Sequence
  Description of Artificial Sequence: Synthetic gluten; 5' sequence + inner sequence + 3'  sequence
tagggaagagaaggacatatgattggccgatcgaccctatcaagagcagcatgttgactagtacatgaccacttga

SEQ ID NO: 43488 - DNA, 76 bp, Artificial Sequence
  Description of Artificial Sequence: Synthetic gluten; 5' sequence + inner sequence + 3'  sequence
tagggaagagaaggacatatgatgtcatatggccgaagcgagaacagctatgtttgactagtacatgaccacttga

SEQ ID NO: 43489 - DNA, 76 bp, Artificial Sequence
  Description of Artificial Sequence: Synthetic gluten; 5' sequence + inner sequence + 3'  sequence
tagggaagagaaggacatatgattcatcataggaacgagctgacctcggcatgttgactagtacatgaccacttga

SEQ ID NO: 43490 - DNA, 76 bp, Artificial Sequence; identical to SEQ ID NO: 3359
  Description of Artificial Sequence: Synthetic gluten; 5' sequence + inner sequence + 3'  sequence

SEQ ID NO: 43491 - DNA, 76 bp, Artificial Sequence; identical to SEQ ID NO: 3698
  Description of Artificial Sequence: Synthetic gluten; 5' sequence + inner sequence + 3'  sequence

SEQ ID NO: 43492 - DNA, 74 bp, Artificial Sequence
  Description of Artificial Sequence: Synthetic gluten; 5' sequence + inner sequence + 3'  sequence
tagggaagagaaggacatatgatccgagagagccgaagaaccaggcaatgattgactagtacatgaccacttga

SEQ ID NO: 43493 - DNA, 76 bp, Artificial Sequence; identical to SEQ ID NO: 3301
  Description of Artificial Sequence: Synthetic gluten; 5' sequence + inner sequence + 3'  sequence

SEQ ID NO: 43494 - DNA, 76 bp, Artificial Sequence
  Description of Artificial Sequence: Synthetic gluten; 5' sequence + inner sequence + 3'  sequence
tagggaagagaaggacatatgatcatgtaacgataggcaacaatgttgtcatattgactagtacatgaccacttga

SEQ ID NO: 43495 - DNA, 76 bp, Artificial Sequence
  Description of Artificial Sequence: Synthetic gluten; 5' sequence + inner sequence + 3'  sequence
tagggaagagaaggacatatgatacgatcgaacctatcatgacgcgggctatattgactagtacatgaccacttga

SEQ ID NO: 43496 - DNA, 76 bp, Artificial Sequence
  Description of Artificial Sequence: Synthetic gluten; 5' sequence + inner sequence + 3'  sequence
tagggaagagaaggacatatgatggcatgcgctgggtagtgatcacgtacggattgactagtacatgaccacttga

SEQ ID NO: 43497 - DNA, 76 bp, Artificial Sequence
  Description of Artificial Sequence: Synthetic gluten; 5' sequence + inner sequence + 3'  sequence
tagggaagagaaggacatatgattggcatgcgagtcactagtctgtactggccttgactagtacatgaccacttga

SEQ ID NO: 43498 - DNA, 76 bp, Artificial Sequence
  Description of Artificial Sequence: Synthetic gluten; 5' sequence + inner sequence + 3'  sequence
tagggaagagaaggacatatgatccgaacgaacctgtcgatcgaagcttcgcattgactagtacatgaccacttga

SEQ ID NO: 43499 - DNA, 76 bp, Artificial Sequence; identical to SEQ ID NO: 31497
  Description of Artificial Sequence: Synthetic gluten; 5' sequence + inner sequence + 3'  sequence

SEQ ID NO: 43500 - DNA, 76 bp, Artificial Sequence
  Description of Artificial Sequence: Synthetic gluten; 5' sequence + inner sequence + 3'  sequence
tagggaagagaaggacatatgatggccacacgattccctcaagtcgttatgtattgactagtacatgaccacttga

SEQ ID NO: 43501 - DNA, 76 bp, Artificial Sequence
  Description of Artificial Sequence: Synthetic gluten; 5' sequence + inner sequence + 3'  sequence
tagggaagagaaggacatatgatctccgcgaagtacctcaacaaacgttcggcttgactagtacatgaccacttga

SEQ ID NO: 43502 - DNA, 76 bp, Artificial Sequence
  Description of Artificial Sequence: Synthetic gluten; 5' sequence + inner sequence + 3'  sequence
tagggaagagaaggacatatgatcgtaccagagccgacgattctgtcaatgtattgactagtacatgaccacttga

SEQ ID NO: 43503 - DNA, 76 bp, Artificial Sequence; identical to SEQ ID NO: 3109
  Description of Artificial Sequence: Synthetic gluten; 5' sequence + inner sequence + 3'  sequence

SEQ ID NO: 43504 - DNA, 76 bp, Artificial Sequence; identical to SEQ ID NO: 39861
  Description of Artificial Sequence: Synthetic gluten; 5' sequence + inner sequence + 3'  sequence

SEQ ID NO: 43505 - DNA, 76 bp, Artificial Sequence
  Description of Artificial Sequence: Synthetic gluten; 5' sequence + inner sequence + 3'  sequence
tagggaagagaaggacatatgatggacgacgcgacctacgagtgagacatggattgactagtacatgaccacttga

SEQ ID NO: 43506 - DNA, 76 bp, Artificial Sequence
  Description of Artificial Sequence: Synthetic gluten; 5' sequence + inner sequence + 3'  sequence
tagggaagagaaggacatatgatggacgacgcggaccttcaagtaggcgtgtattgactagtacatgaccacttga

SEQ ID NO: 43507 - DNA, 76 bp, Artificial Sequence
  Description of Artificial Sequence: Synthetic gluten; 5' sequence + inner sequence + 3'  sequence
tagggaagagaaggacatatgatcacggtgcgaagctatgtctcatcaacgcattgactagtacatgaccacttga

SEQ ID NO: 43508 - DNA, 76 bp, Artificial Sequence
  Description of Artificial Sequence: Synthetic gluten; 5' sequence + inner sequence + 3'  sequence
tagggaagagaaggacatatgatgtcaatcacatgttctttagagccctcgtgttgactagtacatgaccacttga

SEQ ID NO: 43509 - DNA, 76 bp, Artificial Sequence
  Description of Artificial Sequence: Synthetic gluten; 5' sequence + inner sequence + 3'  sequence
tagggaagagaaggacatatgatgtactgcctggatgttgacatgcacttgtcttgactagtacatgaccacttga

SEQ ID NO: 43510 - DNA, 76 bp, Artificial Sequence; identical to SEQ ID NO: 7884
  Description of Artificial Sequence: Synthetic gluten; 5' sequence + inner sequence + 3'  sequence

SEQ ID NO: 43511 - DNA, 76 bp, Artificial Sequence
  Description of Artificial Sequence: Synthetic gluten; 5' sequence + inner sequence + 3'  sequence
tagggaagagaaggacatatgatgtcactctcaagctatcaagtgcgaaggtattgactagtacatgaccacttga

SEQ ID NO: 43512 - DNA, 76 bp, Artificial Sequence
  Description of Artificial Sequence: Synthetic gluten; 5' sequence + inner sequence + 3'  sequence
tagggaagagaaggacatatgatcatgtccggaacgaccacttgagcgtgtcattgactagtacatgaccacttga

SEQ ID NO: 43513 - DNA, 76 bp, Artificial Sequence
  Description of Artificial Sequence: Synthetic gluten; 5' sequence + inner sequence + 3'  sequence
tagggaagagaaggacatatgattggcatgcgatcccctgacagtacttgagcttgactagtacatgaccacttga

SEQ ID NO: 43514 - DNA, 76 bp, Artificial Sequence
  Description of Artificial Sequence: Synthetic gluten; 5' sequence + inner sequence + 3'  sequence
tagggaagagaaggacatatgatggcatgcgacttcccttagatccgtacagcttgactagtacatgaccacttga

SEQ ID NO: 43515 - DNA, 76 bp, Artificial Sequence
  Description of Artificial Sequence: Synthetic gluten; 5' sequence + inner sequence + 3'  sequence
tagggaagagaaggacatatgatcctgagcgcaccctcgtcatgcagctagacttgactagtacatgaccacttga

SEQ ID NO: 43516 - DNA, 76 bp, Artificial Sequence
  Description of Artificial Sequence: Synthetic gluten; 5' sequence + inner sequence + 3'  sequence
tagggaagagaaggacatatgatgcccaaacgaccttcaagatggatcgtgtattgactagtacatgaccacttga

SEQ ID NO: 43517 - DNA, 76 bp, Artificial Sequence; identical to SEQ ID NO: 3312
  Description of Artificial Sequence: Synthetic gluten; 5' sequence + inner sequence + 3'  sequence

SEQ ID NO: 43518 - DNA, 76 bp, Artificial Sequence
  Description of Artificial Sequence: Synthetic gluten; 5' sequence + inner sequence + 3'  sequence
tagggaagagaaggacatatgatgtgccgaagttgcctacaagtgcgagtgtattgactagtacatgaccacttga

SEQ ID NO: 43519 - DNA, 76 bp, Artificial Sequence
  Description of Artificial Sequence: Synthetic gluten; 5' sequence + inner sequence + 3'  sequence
tagggaagagaaggacatatgatcgtaccgcaagagacgtgtccgtgccgtgattgactagtacatgaccacttga

SEQ ID NO: 43520 - DNA, 76 bp, Artificial Sequence
  Description of Artificial Sequence: Synthetic gluten; 5' sequence + inner sequence + 3'  sequence
tagggaagagaaggacatatgatatggcctgcgtatgaccgtcagagcatggattgactagtacatgaccacttga

SEQ ID NO: 43521 - DNA, 76 bp, Artificial Sequence
  Description of Artificial Sequence: Synthetic gluten; 5' sequence + inner sequence + 3'  sequence
tagggaagagaaggacatatgataatgcatcagtgtcaaatgcgttcaagatgttgactagtacatgaccacttga

SEQ ID NO: 43522 - DNA, 77 bp, Artificial Sequence
  Description of Artificial Sequence: Synthetic gluten; 5' sequence + inner sequence + 3'  sequence
tagggaagagaaggacatatgatggcctgcgatggatgttgacatgcacttgtcttgactagtacatgaccacttga

SEQ ID NO: 43523 - DNA, 76 bp, Artificial Sequence
  Description of Artificial Sequence: Synthetic gluten; 5' sequence + inner sequence + 3'  sequence
tagggaagagaaggacatatgatcattcgcgacctaaacgtgacatggacggattgactagtacatgaccacttga

SEQ ID NO: 43524 - DNA, 76 bp, Artificial Sequence
  Description of Artificial Sequence: Synthetic gluten; 5' sequence + inner sequence + 3'  sequence
tagggaagagaaggacatatgattgtacgtcgcgacctacatgtgctgcatcattgactagtacatgaccacttga

SEQ ID NO: 43525 - DNA, 76 bp, Artificial Sequence
  Description of Artificial Sequence: Synthetic gluten; 5' sequence + inner sequence + 3'  sequence
tagggaagagaaggacatatgatgtgcgcgaaaacctatcacgtgatcatggattgactagtacatgaccacttga

SEQ ID NO: 43526 - DNA, 76 bp, Artificial Sequence
  Description of Artificial Sequence: Synthetic gluten; 5' sequence + inner sequence + 3'  sequence
tagggaagagaaggacatatgatatcacgcatagggacttcgatggcacgtcattgactagtacatgaccacttga

SEQ ID NO: 43527 - DNA, 76 bp, Artificial Sequence
  Description of Artificial Sequence: Synthetic gluten; 5' sequence + inner sequence + 3'  sequence
tagggaagagaaggacatatgattgacgaacgcaacctatagaacatgtcgtattgactagtacatgaccacttga

SEQ ID NO: 43528 - DNA, 76 bp, Artificial Sequence
  Description of Artificial Sequence: Synthetic gluten; 5' sequence + inner sequence + 3'  sequence
tagggaagagaaggacatatgatggacggatcgaacctacaagctgtcgtggattgactagtacatgaccacttga

SEQ ID NO: 43529 - DNA, 76 bp, Artificial Sequence; identical to SEQ ID NO: 3198
  Description of Artificial Sequence: Synthetic gluten; 5' sequence + inner sequence + 3'  sequence

SEQ ID NO: 43530 - DNA, 76 bp, Artificial Sequence; identical to SEQ ID NO: 3168
  Description of Artificial Sequence: Synthetic gluten; 5' sequence + inner sequence + 3'  sequence

SEQ ID NO: 43531 - DNA, 76 bp, Artificial Sequence
  Description of Artificial Sequence: Synthetic gluten; 5' sequence + inner sequence + 3'  sequence
tagggaagagaaggacatatgatcaaacgcagtgagcatatggcataagtgggttgactagtacatgaccacttga

SEQ ID NO: 43532 - DNA, 76 bp, Artificial Sequence
  Description of Artificial Sequence: Synthetic gluten; 5' sequence + inner sequence + 3'  sequence
tagggaagagaaggacatatgatgtactgcgcgaccctaaagtgataggcatgttgactagtacatgaccacttga

SEQ ID NO: 43533 - DNA, 75 bp, Artificial Sequence
  Description of Artificial Sequence: Synthetic gluten; 5' sequence + inner sequence + 3'  sequence
tagggaagagaaggacatatgatacgaatgagccgaagatacaatgtcagtattgactagtacatgaccacttga

SEQ ID NO: 43534 - DNA, 75 bp, Artificial Sequence
  Description of Artificial Sequence: Synthetic gluten; 5' sequence + inner sequence + 3'  sequence
tagggaagagaaggacatatgattgagctagcgagaaccgaagatacagggattgactagtacatgaccacttga

SEQ ID NO: 43535 - DNA, 76 bp, Artificial Sequence
  Description of Artificial Sequence: Synthetic gluten; 5' sequence + inner sequence + 3'  sequence
tagggaagagaaggacatatgatgactgaacgaccgaaaggggacatgacgagttgactagtacatgaccacttga

SEQ ID NO: 43536 - DNA, 76 bp, Artificial Sequence
  Description of Artificial Sequence: Synthetic gluten; 5' sequence + inner sequence + 3'  sequence
tagggaagagaaggacatatgattcatgtgtcacgaagccctacaagtcgtcattgactagtacatgaccacttga

SEQ ID NO: 43537 - DNA, 76 bp, Artificial Sequence
  Description of Artificial Sequence: Synthetic gluten; 5' sequence + inner sequence + 3'  sequence
tagggaagagaaggacatatgatcctgagcgaacctgtcaacatcacggagcattgactagtacatgaccacttga

SEQ ID NO: 43538 - DNA, 76 bp, Artificial Sequence; identical to SEQ ID NO: 3126
  Description of Artificial Sequence: Synthetic gluten; 5' sequence + inner sequence + 3'  sequence

SEQ ID NO: 43539 - DNA, 76 bp, Artificial Sequence
  Description of Artificial Sequence: Synthetic gluten; 5' sequence + inner sequence + 3'  sequence
tagggaagagaaggacatatgatcacgtcacagggccgacctctcatgaactattgactagtacatgaccacttga

SEQ ID NO: 43540 - DNA, 76 bp, Artificial Sequence
  Description of Artificial Sequence: Synthetic gluten; 5' sequence + inner sequence + 3'  sequence
tagggaagagaaggacatatgatcaatagagccgaagagcaatgtcaacgagtttgactagtacatgaccacttga

SEQ ID NO: 43541 - DNA, 76 bp, Artificial Sequence
  Description of Artificial Sequence: Synthetic gluten; 5' sequence + inner sequence + 3'  sequence
tagggaagagaaggacatatgatcgcaacggaagtaaaatcagttccgaaacgttgactagtacatgaccacttga

SEQ ID NO: 43542 - DNA, 76 bp, Artificial Sequence
  Description of Artificial Sequence: Synthetic gluten; 5' sequence + inner sequence + 3'  sequence
tagggaagagaaggacatatgatcggcagtcgtaaacgaatcggctaggcatattgactagtacatgaccacttga

SEQ ID NO: 43543 - DNA, 76 bp, Artificial Sequence
  Description of Artificial Sequence: Synthetic gluten; 5' sequence + inner sequence + 3'  sequence
tagggaagagaaggacatatgattcactcgtgtccaacctcccttcgtggacattgactagtacatgaccacttga

SEQ ID NO: 43544 - DNA, 75 bp, Artificial Sequence
  Description of Artificial Sequence: Synthetic gluten; 5' sequence + inner sequence + 3'  sequence
tagggaagagaaggacatatgatatgatcctgcacgaccaaagttggccatgttgactagtacatgaccacttga

SEQ ID NO: 43545 - DNA, 76 bp, Artificial Sequence
  Description of Artificial Sequence: Synthetic gluten; 5' sequence + inner sequence + 3'  sequence
tagggaagagaaggacatatgattgatcgcatggacgtcgatggatgtgggcattgactagtacatgaccacttga

SEQ ID NO: 43546 - DNA, 76 bp, Artificial Sequence
  Description of Artificial Sequence: Synthetic gluten; 5' sequence + inner sequence + 3'  sequence
tagggaagagaaggacatatgatccgaacgaccgggaatgaacgtgtcagaaattgactagtacatgaccacttga

SEQ ID NO: 43547 - DNA, 76 bp, Artificial Sequence
  Description of Artificial Sequence: Synthetic gluten; 5' sequence + inner sequence + 3'  sequence
tagggaagagaaggacatatgatcatgtacggacgaggcattgcgtgctcatattgactagtacatgaccacttga

SEQ ID NO: 43548 - DNA, 76 bp, Artificial Sequence
  Description of Artificial Sequence: Synthetic gluten; 5' sequence + inner sequence + 3'  sequence
tagggaagagaaggacatatgattgaccgatcgaccctatcaagtgcagcatgttgactagtacatgaccacttga

SEQ ID NO: 43549 - DNA, 76 bp, Artificial Sequence
  Description of Artificial Sequence: Synthetic gluten; 5' sequence + inner sequence + 3'  sequence
tagggaagagaaggacatatgatccgatcgacctgaatgtgcgtggcaattgattgactagtacatgaccacttga

SEQ ID NO: 43550 - DNA, 76 bp, Artificial Sequence
  Description of Artificial Sequence: Synthetic gluten; 5' sequence + inner sequence + 3'  sequence
tagggaagagaaggacatatgatgacgatgctgaccgtcaagggagtcacgtattgactagtacatgaccacttga

SEQ ID NO: 43551 - DNA, 76 bp, Artificial Sequence
  Description of Artificial Sequence: Synthetic gluten; 5' sequence + inner sequence + 3'  sequence
tagggaagagaaggacatatgattgaacaagcataggacgacacgcagtcatattgactagtacatgaccacttga

SEQ ID NO: 43552 - DNA, 76 bp, Artificial Sequence
  Description of Artificial Sequence: Synthetic gluten; 5' sequence + inner sequence + 3'  sequence
tagggaagagaaggacatatgatggactgcacgaccgatagagcatggactgtttgactagtacatgaccacttga

SEQ ID NO: 43553 - DNA, 76 bp, Artificial Sequence
  Description of Artificial Sequence: Synthetic gluten; 5' sequence + inner sequence + 3'  sequence
tagggaagagaaggacatatgatcatccaccgatagcgaatatggcctggatcttgactagtacatgaccacttga

SEQ ID NO: 43554 - DNA, 76 bp, Artificial Sequence; identical to SEQ ID NO: 15939
  Description of Artificial Sequence: Synthetic gluten; 5' sequence + inner sequence + 3'  sequence

SEQ ID NO: 43555 - DNA, 76 bp, Artificial Sequence
  Description of Artificial Sequence: Synthetic gluten; 5' sequence + inner sequence + 3'  sequence
tagggaagagaaggacatatgatatgtacggatcgaacgtggtagtgtgcgcattgactagtacatgaccacttga

SEQ ID NO: 43556 - DNA, 76 bp, Artificial Sequence
  Description of Artificial Sequence: Synthetic gluten; 5' sequence + inner sequence + 3'  sequence
tagggaagagaaggacatatgatcgacacgctacctgtgatctggacttggcattgactagtacatgaccacttga

SEQ ID NO: 43557 - DNA, 76 bp, Artificial Sequence
  Description of Artificial Sequence: Synthetic gluten; 5' sequence + inner sequence + 3'  sequence
tagggaagagaaggacatatgattgcaacggcaccgtagattccacaacagtgttgactagtacatgaccacttga

SEQ ID NO: 43558 - DNA, 76 bp, Artificial Sequence
  Description of Artificial Sequence: Synthetic gluten; 5' sequence + inner sequence + 3'  sequence
tagggaagagaaggacatatgatctcagcgcaaagaccttcaatgcgatcggcttgactagtacatgaccacttga

SEQ ID NO: 43559 - DNA, 77 bp, Artificial Sequence
  Description of Artificial Sequence: Synthetic gluten; 5' sequence + inner sequence + 3'  sequence
tagggaagagaaggacatatgattggcctgatcgaacctagagagtggcgtggattgactagtacatgaccacttga

SEQ ID NO: 43560 - DNA, 76 bp, Artificial Sequence
  Description of Artificial Sequence: Synthetic gluten; 5' sequence + inner sequence + 3'  sequence
tagggaagagaaggacatatgatcgacacgatggccttactgtgagcgggtcattgactagtacatgaccacttga

SEQ ID NO: 43561 - DNA, 76 bp, Artificial Sequence
  Description of Artificial Sequence: Synthetic gluten; 5' sequence + inner sequence + 3'  sequence
tagggaagagaaggacatatgatggcctgatcgaacctagagcgtggcgtggattgactagtacatgaccacttga

SEQ ID NO: 43562 - DNA, 76 bp, Artificial Sequence
  Description of Artificial Sequence: Synthetic gluten; 5' sequence + inner sequence + 3'  sequence
tagggaagagaaggacatatgatcgaaacgccgtaaaagagctcatgtgggttttgactagtacatgaccacttga

SEQ ID NO: 43563 - DNA, 76 bp, Artificial Sequence
  Description of Artificial Sequence: Synthetic gluten; 5' sequence + inner sequence + 3'  sequence
tagggaagagaaggacatatgatgaacgcatgtcgtccctacacgtgatcatgttgactagtacatgaccacttga

SEQ ID NO: 43564 - DNA, 76 bp, Artificial Sequence
  Description of Artificial Sequence: Synthetic gluten; 5' sequence + inner sequence + 3'  sequence
tagggaagagaaggacatatgatggacaacgatgaacggaagggcgtcgggtattgactagtacatgaccacttga

SEQ ID NO: 43565 - DNA, 76 bp, Artificial Sequence; identical to SEQ ID NO: 3479
  Description of Artificial Sequence: Synthetic gluten; 5' sequence + inner sequence + 3'  sequence

SEQ ID NO: 43566 - DNA, 76 bp, Artificial Sequence
  Description of Artificial Sequence: Synthetic gluten; 5' sequence + inner sequence + 3'  sequence
tagggaagagaaggacatatgattcggcacgaaactttagagccctaacggtgttgactagtacatgaccacttga

SEQ ID NO: 43567 - DNA, 76 bp, Artificial Sequence
  Description of Artificial Sequence: Synthetic gluten; 5' sequence + inner sequence + 3'  sequence
tagggaagagaaggacatatgatggccgatcgaccgaaagaacgaacgacgtgttgactagtacatgaccacttga

SEQ ID NO: 43568 - DNA, 76 bp, Artificial Sequence
  Description of Artificial Sequence: Synthetic gluten; 5' sequence + inner sequence + 3'  sequence
tagggaagagaaggacatatgattggccgatcgaccctatcaagcgcagcatgttgactagtacatgaccacttga

SEQ ID NO: 43569 - DNA, 75 bp, Artificial Sequence
  Description of Artificial Sequence: Synthetic gluten; 5' sequence + inner sequence + 3'  sequence
tagggaagagaaggacatatgatgacgacgcgaacctatcaagttgcatggattgactagtacatgaccacttga

SEQ ID NO: 43570 - DNA, 76 bp, Artificial Sequence; identical to SEQ ID NO: 3827
  Description of Artificial Sequence: Synthetic gluten; 5' sequence + inner sequence + 3'  sequence

SEQ ID NO: 43571 - DNA, 76 bp, Artificial Sequence; identical to SEQ ID NO: 3136
  Description of Artificial Sequence: Synthetic gluten; 5' sequence + inner sequence + 3'  sequence

SEQ ID NO: 43572 - DNA, 76 bp, Artificial Sequence
  Description of Artificial Sequence: Synthetic gluten; 5' sequence + inner sequence + 3'  sequence
tagggaagagaaggacatatgatggacagaacggacctatcatgtgacaggtattgactagtacatgaccacttga

SEQ ID NO: 43573 - DNA, 76 bp, Artificial Sequence
  Description of Artificial Sequence: Synthetic gluten; 5' sequence + inner sequence + 3'  sequence
tagggaagagaaggacatatgatatggccggatcggaccgtgagtgctagtcattgactagtacatgaccacttga

SEQ ID NO: 43574 - DNA, 76 bp, Artificial Sequence
  Description of Artificial Sequence: Synthetic gluten; 5' sequence + inner sequence + 3'  sequence
tagggaagagaaggacatatgatcctaaacgcacccttcaagttggcatcgtattgactagtacatgaccacttga

SEQ ID NO: 43575 - DNA, 76 bp, Artificial Sequence
  Description of Artificial Sequence: Synthetic gluten; 5' sequence + inner sequence + 3'  sequence
tagggaagagaaggacatatgatggcctgatcgaacctagagagtggcgttgattgactagtacatgaccacttga

SEQ ID NO: 43576 - DNA, 76 bp, Artificial Sequence
  Description of Artificial Sequence: Synthetic gluten; 5' sequence + inner sequence + 3'  sequence
tagggaagagaaggacatatgatactcgtatggccgattgacctcaatgggcattgactagtacatgaccacttga

SEQ ID NO: 43577 - DNA, 76 bp, Artificial Sequence
  Description of Artificial Sequence: Synthetic gluten; 5' sequence + inner sequence + 3'  sequence
tagggaagagaaggacatatgatgcactgcgatgacctaagatctaggcagcattgactagtacatgaccacttga

SEQ ID NO: 43578 - DNA, 76 bp, Artificial Sequence; identical to SEQ ID NO: 15744
  Description of Artificial Sequence: Synthetic gluten; 5' sequence + inner sequence + 3'  sequence

SEQ ID NO: 43579 - DNA, 76 bp, Artificial Sequence
  Description of Artificial Sequence: Synthetic gluten; 5' sequence + inner sequence + 3'  sequence
tagggaagagaaggacatatgatgccttccgaacccttcatgtgatcgtggacttgactagtacatgaccacttga

SEQ ID NO: 43580 - DNA, 76 bp, Artificial Sequence
  Description of Artificial Sequence: Synthetic gluten; 5' sequence + inner sequence + 3'  sequence
tagggaagagaaggacatatgatcaattggcctgaacgaaccttggtgcggctttgactagtacatgaccacttga

SEQ ID NO: 43581 - DNA, 76 bp, Artificial Sequence
  Description of Artificial Sequence: Synthetic gluten; 5' sequence + inner sequence + 3'  sequence
tagggaagagaaggacatatgatgaccgcacgatgaccatttcaacgtggccattgactagtacatgaccacttga

SEQ ID NO: 43582 - DNA, 76 bp, Artificial Sequence
  Description of Artificial Sequence: Synthetic gluten; 5' sequence + inner sequence + 3'  sequence
tagggaagagaaggacatatgatggcctaacgtaccttcaagtcaggagtgtattgactagtacatgaccacttga

SEQ ID NO: 43583 - DNA, 71 bp, Artificial Sequence
  Description of Artificial Sequence: Synthetic gluten; 5' sequence + inner sequence + 3'  sequence
tagggaagagaaggacatatgatcgtaccggcatgctctaggcaaccattgactagtacatgaccacttga

SEQ ID NO: 43584 - DNA, 76 bp, Artificial Sequence
  Description of Artificial Sequence: Synthetic gluten; 5' sequence + inner sequence + 3'  sequence
tagggaagagaaggacatatgatacggtcacgaccacttgccaaatgttagctttgactagtacatgaccacttga

SEQ ID NO: 43585 - DNA, 76 bp, Artificial Sequence
  Description of Artificial Sequence: Synthetic gluten; 5' sequence + inner sequence + 3'  sequence
tagggaagagaaggacatatgattgcccaaacgaaccttagagcatggccgtattgactagtacatgaccacttga

SEQ ID NO: 43586 - DNA, 76 bp, Artificial Sequence; identical to SEQ ID NO: 39677
  Description of Artificial Sequence: Synthetic gluten; 5' sequence + inner sequence + 3'  sequence

SEQ ID NO: 43587 - DNA, 76 bp, Artificial Sequence
  Description of Artificial Sequence: Synthetic gluten; 5' sequence + inner sequence + 3'  sequence
tagggaagagaaggacatatgattcagtccgacctgaactatctgggcacgcattgactagtacatgaccacttga

SEQ ID NO: 43588 - DNA, 76 bp, Artificial Sequence
  Description of Artificial Sequence: Synthetic gluten; 5' sequence + inner sequence + 3'  sequence
tagggaagagaaggacatatgatcatgtacgaacgcgacattcatgttcattattgactagtacatgaccacttga

SEQ ID NO: 43589 - DNA, 76 bp, Artificial Sequence
  Description of Artificial Sequence: Synthetic gluten; 5' sequence + inner sequence + 3'  sequence
tagggaagagaaggacatatgattggcccgagcgaaccgatcacagtgaggcattgactagtacatgaccacttga

SEQ ID NO: 43590 - DNA, 76 bp, Artificial Sequence
  Description of Artificial Sequence: Synthetic gluten; 5' sequence + inner sequence + 3'  sequence
tagggaagagaaggacatatgattaacatgtcacagtgggccttgctcgaaccttgactagtacatgaccacttga

SEQ ID NO: 43591 - DNA, 76 bp, Artificial Sequence
  Description of Artificial Sequence: Synthetic gluten; 5' sequence + inner sequence + 3'  sequence
tagggaagagaaggacatatgatggccagagcgtaccttcatgtataggcaaattgactagtacatgaccacttga

SEQ ID NO: 43592 - DNA, 74 bp, Artificial Sequence
  Description of Artificial Sequence: Synthetic gluten; 5' sequence + inner sequence + 3'  sequence
tagggaagagaaggacatatgatggccgacacccctatcaagctggacatgttgactagtacatgaccacttga

SEQ ID NO: 43593 - DNA, 76 bp, Artificial Sequence
  Description of Artificial Sequence: Synthetic gluten; 5' sequence + inner sequence + 3'  sequence
tagggaagagaaggacatatgatggccgaatcggaactagcaagcggtatgtattgactagtacatgaccacttga

SEQ ID NO: 43594 - DNA, 76 bp, Artificial Sequence
  Description of Artificial Sequence: Synthetic gluten; 5' sequence + inner sequence + 3'  sequence
tagggaagagaaggacatatgatggcctgcgatgaccgctcaagtgccaggcattgactagtacatgaccacttga

SEQ ID NO: 43595 - DNA, 76 bp, Artificial Sequence; identical to SEQ ID NO: 39642
  Description of Artificial Sequence: Synthetic gluten; 5' sequence + inner sequence + 3'  sequence

SEQ ID NO: 43596 - DNA, 76 bp, Artificial Sequence
  Description of Artificial Sequence: Synthetic gluten; 5' sequence + inner sequence + 3'  sequence
tagggaagagaaggacatatgatggcctgcgatggatgaggcgctgcactagtttgactagtacatgaccacttga

SEQ ID NO: 43597 - DNA, 76 bp, Artificial Sequence
  Description of Artificial Sequence: Synthetic gluten; 5' sequence + inner sequence + 3'  sequence
tagggaagagaaggacatatgatactgatcgaaccgtcgaagtcagtttcacattgactagtacatgaccacttga

SEQ ID NO: 43598 - DNA, 76 bp, Artificial Sequence
  Description of Artificial Sequence: Synthetic gluten; 5' sequence + inner sequence + 3'  sequence
tagggaagagaaggacatatgatggacggagcgaaccaagtacaggcagcttattgactagtacatgaccacttga

SEQ ID NO: 43599 - DNA, 76 bp, Artificial Sequence
  Description of Artificial Sequence: Synthetic gluten; 5' sequence + inner sequence + 3'  sequence
tagggaagagaaggacatatgatcatgtctaacagaaggccactcggctcatattgactagtacatgaccacttga

SEQ ID NO: 43600 - DNA, 76 bp, Artificial Sequence; identical to SEQ ID NO: 31928
  Description of Artificial Sequence: Synthetic gluten; 5' sequence + inner sequence + 3'  sequence

SEQ ID NO: 43601 - DNA, 76 bp, Artificial Sequence
  Description of Artificial Sequence: Synthetic gluten; 5' sequence + inner sequence + 3'  sequence
tagggaagagaaggacatatgatccgagacaagctacatcagacaattgctaattgactagtacatgaccacttga

SEQ ID NO: 43602 - DNA, 76 bp, Artificial Sequence
  Description of Artificial Sequence: Synthetic gluten; 5' sequence + inner sequence + 3'  sequence
tagggaagagaaggacatatgatgtactgatcggaacatggcgactgtcaacgttgactagtacatgaccacttga

SEQ ID NO: 43603 - DNA, 76 bp, Artificial Sequence
  Description of Artificial Sequence: Synthetic gluten; 5' sequence + inner sequence + 3'  sequence
tagggaagagaaggacatatgatggccgacgcgcactgttcatgcactacgtcttgactagtacatgaccacttga

SEQ ID NO: 43604 - DNA, 76 bp, Artificial Sequence
  Description of Artificial Sequence: Synthetic gluten; 5' sequence + inner sequence + 3'  sequence
tagggaagagaaggacatatgatcatgcactggaacgagtgggaaccagcatattgactagtacatgaccacttga

SEQ ID NO: 43605 - DNA, 76 bp, Artificial Sequence
  Description of Artificial Sequence: Synthetic gluten; 5' sequence + inner sequence + 3'  sequence
tagggaagagaaggacatatgatcgtaccgcaagtgacgtgtccgcgccgtgattgactagtacatgaccacttga

SEQ ID NO: 43606 - DNA, 76 bp, Artificial Sequence
  Description of Artificial Sequence: Synthetic gluten; 5' sequence + inner sequence + 3'  sequence
tagggaagagaaggacatatgattggaggacgcagtaaataacgagctcgtggttgactagtacatgaccacttga

SEQ ID NO: 43607 - DNA, 76 bp, Artificial Sequence
  Description of Artificial Sequence: Synthetic gluten; 5' sequence + inner sequence + 3'  sequence
tagggaagagaaggacatatgatggccgaagcgaacactagtcagagcatgtattgactagtacatgaccacttga

SEQ ID NO: 43608 - DNA, 76 bp, Artificial Sequence
  Description of Artificial Sequence: Synthetic gluten; 5' sequence + inner sequence + 3'  sequence
tagggaagagaaggacatatgatggacctgagctgcacgatcaaggcggaatgttgactagtacatgaccacttga

SEQ ID NO: 43609 - DNA, 76 bp, Artificial Sequence
  Description of Artificial Sequence: Synthetic gluten; 5' sequence + inner sequence + 3'  sequence
tagggaagagaaggacatatgatgatgtcctgcgatgacctaaagcgtacgtgttgactagtacatgaccacttga

SEQ ID NO: 43610 - DNA, 76 bp, Artificial Sequence; identical to SEQ ID NO: 7407
  Description of Artificial Sequence: Synthetic gluten; 5' sequence + inner sequence + 3'  sequence

SEQ ID NO: 43611 - DNA, 76 bp, Artificial Sequence
  Description of Artificial Sequence: Synthetic gluten; 5' sequence + inner sequence + 3'  sequence
tagggaagagaaggacatatgatcatgtgctaattcggacggacaagttcatattgactagtacatgaccacttga

SEQ ID NO: 43612 - DNA, 76 bp, Artificial Sequence
  Description of Artificial Sequence: Synthetic gluten; 5' sequence + inner sequence + 3'  sequence
tagggaagagaaggacatatgattgacatgtgaccgactggcttagctgggcattgactagtacatgaccacttga

SEQ ID NO: 43613 - DNA, 76 bp, Artificial Sequence
  Description of Artificial Sequence: Synthetic gluten; 5' sequence + inner sequence + 3'  sequence
tagggaagagaaggacatatgatggccgacgagaccctgcaattggccatggattgactagtacatgaccacttga

SEQ ID NO: 43614 - DNA, 76 bp, Artificial Sequence
  Description of Artificial Sequence: Synthetic gluten; 5' sequence + inner sequence + 3'  sequence
tagggaagagaaggacatatgatgtactgcgcgacctcaacgtgcgtgatgtattgactagtacatgaccacttga

SEQ ID NO: 43615 - DNA, 76 bp, Artificial Sequence
  Description of Artificial Sequence: Synthetic gluten; 5' sequence + inner sequence + 3'  sequence
tagggaagagaaggacatatgatccgaacggcgtgtaatgggcaaacttcagattgactagtacatgaccacttga

SEQ ID NO: 43616 - DNA, 76 bp, Artificial Sequence
  Description of Artificial Sequence: Synthetic gluten; 5' sequence + inner sequence + 3'  sequence
tagggaagagaaggacatatgatggacgcaacgaacctaagagtggccagggattgactagtacatgaccacttga

SEQ ID NO: 43617 - DNA, 76 bp, Artificial Sequence
  Description of Artificial Sequence: Synthetic gluten; 5' sequence + inner sequence + 3'  sequence
tagggaagagaaggacatatgatggcctgcgatggatggggcaatacgacgttttgactagtacatgaccacttga

SEQ ID NO: 43618 - DNA, 76 bp, Artificial Sequence
  Description of Artificial Sequence: Synthetic gluten; 5' sequence + inner sequence + 3'  sequence
tagggaagagaaggacatatgatgacattcgagtcaccagtcatgcacgacgattgactagtacatgaccacttga

SEQ ID NO: 43619 - DNA, 76 bp, Artificial Sequence
  Description of Artificial Sequence: Synthetic gluten; 5' sequence + inner sequence + 3'  sequence
tagggaagagaaggacatatgatggcccgaacgaccgttgaagagcatgcactttgactagtacatgaccacttga

SEQ ID NO: 43620 - DNA, 76 bp, Artificial Sequence
  Description of Artificial Sequence: Synthetic gluten; 5' sequence + inner sequence + 3'  sequence
tagggaagagaaggacatatgattcatcagatggacgccgaatgggtgtgggcttgactagtacatgaccacttga

SEQ ID NO: 43621 - DNA, 76 bp, Artificial Sequence
  Description of Artificial Sequence: Synthetic gluten; 5' sequence + inner sequence + 3'  sequence
tagggaagagaaggacatatgatggacgcgatggatgtggaaaggtctagtcattgactagtacatgaccacttga

SEQ ID NO: 43622 - DNA, 76 bp, Artificial Sequence
  Description of Artificial Sequence: Synthetic gluten; 5' sequence + inner sequence + 3'  sequence
tagggaagagaaggacatatgatatggacgcagcgtaccttcaagtgctcgtgttgactagtacatgaccacttga

SEQ ID NO: 43623 - DNA, 76 bp, Artificial Sequence
  Description of Artificial Sequence: Synthetic gluten; 5' sequence + inner sequence + 3'  sequence
tagggaagagaaggacatatgattggcatgcgatggttccgagaaagtgcgaattgactagtacatgaccacttga

SEQ ID NO: 43624 - DNA, 76 bp, Artificial Sequence
  Description of Artificial Sequence: Synthetic gluten; 5' sequence + inner sequence + 3'  sequence
tagggaagagaaggacatatgatggactgcgacttcacagatcaggcaatgcattgactagtacatgaccacttga

SEQ ID NO: 43625 - DNA, 76 bp, Artificial Sequence
  Description of Artificial Sequence: Synthetic gluten; 5' sequence + inner sequence + 3'  sequence
tagggaagagaaggacatatgatggcattcgatgcactacaaggtgttgtgtattgactagtacatgaccacttga

SEQ ID NO: 43626 - DNA, 76 bp, Artificial Sequence
  Description of Artificial Sequence: Synthetic gluten; 5' sequence + inner sequence + 3'  sequence
tagggaagagaaggacatatgatcatggctaaacagcagcgtaattcgtcatattgactagtacatgaccacttga

SEQ ID NO: 43627 - DNA, 76 bp, Artificial Sequence
  Description of Artificial Sequence: Synthetic gluten; 5' sequence + inner sequence + 3'  sequence
tagggaagagaaggacatatgattcacagatggcgtgatctgaaccggtggcattgactagtacatgaccacttga

SEQ ID NO: 43628 - DNA, 76 bp, Artificial Sequence
  Description of Artificial Sequence: Synthetic gluten; 5' sequence + inner sequence + 3'  sequence
tagggaagagaaggacatatgatggccgagctggatgtgagcatgcatctagtttgactagtacatgaccacttga

SEQ ID NO: 43629 - DNA, 76 bp, Artificial Sequence
  Description of Artificial Sequence: Synthetic gluten; 5' sequence + inner sequence + 3'  sequence
tagggaagagaaggacatatgatccgatcagccctatcaagcatgcactgtctttgactagtacatgaccacttga

SEQ ID NO: 43630 - DNA, 76 bp, Artificial Sequence
  Description of Artificial Sequence: Synthetic gluten; 5' sequence + inner sequence + 3'  sequence
tagggaagagaaggacatatgattcgaatatgtacgaagatgcccattcagtgttgactagtacatgaccacttga

SEQ ID NO: 43631 - DNA, 76 bp, Artificial Sequence
  Description of Artificial Sequence: Synthetic gluten; 5' sequence + inner sequence + 3'  sequence
tagggaagagaaggacatatgatctcattagtggccgagaccgcaattccatcttgactagtacatgaccacttga

SEQ ID NO: 43632 - DNA, 76 bp, Artificial Sequence; identical to SEQ ID NO: 39961
  Description of Artificial Sequence: Synthetic gluten; 5' sequence + inner sequence + 3'  sequence

SEQ ID NO: 43633 - DNA, 76 bp, Artificial Sequence
  Description of Artificial Sequence: Synthetic gluten; 5' sequence + inner sequence + 3'  sequence
tagggaagagaaggacatatgatccagcatctcataagtggccttacctgcctttgactagtacatgaccacttga

SEQ ID NO: 43634 - DNA, 76 bp, Artificial Sequence
  Description of Artificial Sequence: Synthetic gluten; 5' sequence + inner sequence + 3'  sequence
tagggaagagaaggacatatgatgtcctgatcgccctagcaagcggccatggattgactagtacatgaccacttga

SEQ ID NO: 43635 - DNA, 76 bp, Artificial Sequence
  Description of Artificial Sequence: Synthetic gluten; 5' sequence + inner sequence + 3'  sequence
tagggaagagaaggacatatgatcctgacacgataaagatagagcttgcacgattgactagtacatgaccacttga

SEQ ID NO: 43636 - DNA, 76 bp, Artificial Sequence
  Description of Artificial Sequence: Synthetic gluten; 5' sequence + inner sequence + 3'  sequence
tagggaagagaaggacatatgatcctgctggagcctgagccgaagatcagtcattgactagtacatgaccacttga

SEQ ID NO: 43637 - DNA, 76 bp, Artificial Sequence
  Description of Artificial Sequence: Synthetic gluten; 5' sequence + inner sequence + 3'  sequence
tagggaagagaaggacatatgattcaagatggccgaacgaaacatggcagtcattgactagtacatgaccacttga

SEQ ID NO: 43638 - DNA, 76 bp, Artificial Sequence
  Description of Artificial Sequence: Synthetic gluten; 5' sequence + inner sequence + 3'  sequence
tagggaagagaaggacatatgatcacaacgcaagtcttcctttatgtcatctattgactagtacatgaccacttga

SEQ ID NO: 43639 - DNA, 76 bp, Artificial Sequence
  Description of Artificial Sequence: Synthetic gluten; 5' sequence + inner sequence + 3'  sequence
tagggaagagaaggacatatgatccatcatagggttggtgccactgatgtatattgactagtacatgaccacttga

SEQ ID NO: 43640 - DNA, 76 bp, Artificial Sequence
  Description of Artificial Sequence: Synthetic gluten; 5' sequence + inner sequence + 3'  sequence
tagggaagagaaggacatatgatcatgacgatcacagcgaggtttacgtcatattgactagtacatgaccacttga

SEQ ID NO: 43641 - DNA, 71 bp, Artificial Sequence
  Description of Artificial Sequence: Synthetic gluten; 5' sequence + inner sequence + 3'  sequence
tagggaagagaaggacatatgatccgagctgacctatcaacgcggtcattgactagtacatgaccacttga

SEQ ID NO: 43642 - DNA, 76 bp, Artificial Sequence
  Description of Artificial Sequence: Synthetic gluten; 5' sequence + inner sequence + 3'  sequence
tagggaagagaaggacatatgatagtcacgccctaacgttgcctatgctagcattgactagtacatgaccacttga

SEQ ID NO: 43643 - DNA, 76 bp, Artificial Sequence
  Description of Artificial Sequence: Synthetic gluten; 5' sequence + inner sequence + 3'  sequence
tagggaagagaaggacatatgatccgatcgaaaccggagagcatgcacggagcttgactagtacatgaccacttga

SEQ ID NO: 43644 - DNA, 76 bp, Artificial Sequence
  Description of Artificial Sequence: Synthetic gluten; 5' sequence + inner sequence + 3'  sequence
tagggaagagaaggacatatgatatgtactgtatccacggtcatagagcatcattgactagtacatgaccacttga

SEQ ID NO: 43645 - DNA, 76 bp, Artificial Sequence
  Description of Artificial Sequence: Synthetic gluten; 5' sequence + inner sequence + 3'  sequence
tagggaagagaaggacatatgatcgtaccgcaagtgacgcgtccgtgccgtgattgactagtacatgaccacttga

SEQ ID NO: 43646 - DNA, 73 bp, Artificial Sequence
  Description of Artificial Sequence: Synthetic gluten; 5' sequence + inner sequence + 3'  sequence
tagggaagagaaggacatatgatcctgagcgcacctgggcatcactgtcattgactagtacatgaccacttga

SEQ ID NO: 43647 - DNA, 76 bp, Artificial Sequence
  Description of Artificial Sequence: Synthetic gluten; 5' sequence + inner sequence + 3'  sequence
tagggaagagaaggacatatgattatggactgagcggaactgcactatgcatgttgactagtacatgaccacttga

SEQ ID NO: 43648 - DNA, 76 bp, Artificial Sequence; identical to SEQ ID NO: 3791
  Description of Artificial Sequence: Synthetic gluten; 5' sequence + inner sequence + 3'  sequence

SEQ ID NO: 43649 - DNA, 76 bp, Artificial Sequence
  Description of Artificial Sequence: Synthetic gluten; 5' sequence + inner sequence + 3'  sequence
tagggaagagaaggacatatgataatgtggactgagcggaacttaagatagtattgactagtacatgaccacttga

SEQ ID NO: 43650 - DNA, 76 bp, Artificial Sequence
  Description of Artificial Sequence: Synthetic gluten; 5' sequence + inner sequence + 3'  sequence
tagggaagagaaggacatatgattcttcgcggaacgatttagacgcgtcaactttgactagtacatgaccacttga

SEQ ID NO: 43651 - DNA, 76 bp, Artificial Sequence; identical to SEQ ID NO: 3926
  Description of Artificial Sequence: Synthetic gluten; 5' sequence + inner sequence + 3'  sequence

SEQ ID NO: 43652 - DNA, 76 bp, Artificial Sequence
  Description of Artificial Sequence: Synthetic gluten; 5' sequence + inner sequence + 3'  sequence
tagggaagagaaggacatatgatggactgaacgagcctagtcttagcgtgtctttgactagtacatgaccacttga

SEQ ID NO: 43653 - DNA, 76 bp, Artificial Sequence; identical to SEQ ID NO: 3063
  Description of Artificial Sequence: Synthetic gluten; 5' sequence + inner sequence + 3'  sequence

SEQ ID NO: 43654 - DNA, 76 bp, Artificial Sequence
  Description of Artificial Sequence: Synthetic gluten; 5' sequence + inner sequence + 3'  sequence
tagggaagagaaggacatatgatcctgaacgcgtcctaatgagtcattacgaattgactagtacatgaccacttga

SEQ ID NO: 43655 - DNA, 76 bp, Artificial Sequence
  Description of Artificial Sequence: Synthetic gluten; 5' sequence + inner sequence + 3'  sequence
tagggaagagaaggacatatgatccgagcggaaatggaataggcaaaccagctttgactagtacatgaccacttga

SEQ ID NO: 43656 - DNA, 76 bp, Artificial Sequence
  Description of Artificial Sequence: Synthetic gluten; 5' sequence + inner sequence + 3'  sequence
tagggaagagaaggacatatgatccgagcgacattacaaggcaaaactttggtttgactagtacatgaccacttga

SEQ ID NO: 43657 - DNA, 76 bp, Artificial Sequence
  Description of Artificial Sequence: Synthetic gluten; 5' sequence + inner sequence + 3'  sequence
tagggaagagaaggacatatgatcgaaacgcggtgcagtaagatgtgcttcgcttgactagtacatgaccacttga

SEQ ID NO: 43658 - DNA, 76 bp, Artificial Sequence
  Description of Artificial Sequence: Synthetic gluten; 5' sequence + inner sequence + 3'  sequence
tagggaagagaaggacatatgatgtcatgcgcggaccttcaagtaggcgtgtattgactagtacatgaccacttga

SEQ ID NO: 43659 - DNA, 76 bp, Artificial Sequence
  Description of Artificial Sequence: Synthetic gluten; 5' sequence + inner sequence + 3'  sequence
tagggaagagaaggacatatgataatgtgtcatgatcgcaccctcaagttggcttgactagtacatgaccacttga

SEQ ID NO: 43660 - DNA, 76 bp, Artificial Sequence
  Description of Artificial Sequence: Synthetic gluten; 5' sequence + inner sequence + 3'  sequence
tagggaagagaaggacatatgatcggtccagataccagacgggctaggcacaattgactagtacatgaccacttga

SEQ ID NO: 43661 - DNA, 76 bp, Artificial Sequence
  Description of Artificial Sequence: Synthetic gluten; 5' sequence + inner sequence + 3'  sequence
tagggaagagaaggacatatgatcttacctagcacgtggacaggtaggcggacttgactagtacatgaccacttga

SEQ ID NO: 43662 - DNA, 76 bp, Artificial Sequence
  Description of Artificial Sequence: Synthetic gluten; 5' sequence + inner sequence + 3'  sequence
tagggaagagaaggacatatgatcctgcgcgaaccgttagaactagtactggcttgactagtacatgaccacttga

SEQ ID NO: 43663 - DNA, 76 bp, Artificial Sequence
  Description of Artificial Sequence: Synthetic gluten; 5' sequence + inner sequence + 3'  sequence
tagggaagagaaggacatatgatggcctgatcgaacctagagagtggcgaggattgactagtacatgaccacttga

SEQ ID NO: 43664 - DNA, 76 bp, Artificial Sequence
  Description of Artificial Sequence: Synthetic gluten; 5' sequence + inner sequence + 3'  sequence
tagggaagagaaggacatatgatctcatcacatggccgaccgtagatggacgattgactagtacatgaccacttga

SEQ ID NO: 43665 - DNA, 76 bp, Artificial Sequence
  Description of Artificial Sequence: Synthetic gluten; 5' sequence + inner sequence + 3'  sequence
tagggaagagaaggacatatgatcatgtacacaccaaagttagcttgctcatattgactagtacatgaccacttga

SEQ ID NO: 43666 - DNA, 76 bp, Artificial Sequence
  Description of Artificial Sequence: Synthetic gluten; 5' sequence + inner sequence + 3'  sequence
tagggaagagaaggacatatgattggcatgaacgaacctattcaaacggtctattgactagtacatgaccacttga

SEQ ID NO: 43667 - DNA, 76 bp, Artificial Sequence
  Description of Artificial Sequence: Synthetic gluten; 5' sequence + inner sequence + 3'  sequence
tagggaagagaaggacatatgatgtgctcgaaacccgtaagtggcatggcgtattgactagtacatgaccacttga

SEQ ID NO: 43668 - DNA, 76 bp, Artificial Sequence
  Description of Artificial Sequence: Synthetic gluten; 5' sequence + inner sequence + 3'  sequence
tagggaagagaaggacatatgatcatgcccaacgggatgtacgcctagtccaattgactagtacatgaccacttga

SEQ ID NO: 43669 - DNA, 76 bp, Artificial Sequence; identical to SEQ ID NO: 3943
  Description of Artificial Sequence: Synthetic gluten; 5' sequence + inner sequence + 3'  sequence

SEQ ID NO: 43670 - DNA, 76 bp, Artificial Sequence
  Description of Artificial Sequence: Synthetic gluten; 5' sequence + inner sequence + 3'  sequence
tagggaagagaaggacatatgatcgacagagccgaagaacgagtgttaacgcattgactagtacatgaccacttga

SEQ ID NO: 43671 - DNA, 76 bp, Artificial Sequence
  Description of Artificial Sequence: Synthetic gluten; 5' sequence + inner sequence + 3'  sequence
tagggaagagaaggacatatgatgtcatgcgataccctaacgagctaggcatattgactagtacatgaccacttga

SEQ ID NO: 43672 - DNA, 76 bp, Artificial Sequence; identical to SEQ ID NO: 7348
  Description of Artificial Sequence: Synthetic gluten; 5' sequence + inner sequence + 3'  sequence

SEQ ID NO: 43673 - DNA, 76 bp, Artificial Sequence
  Description of Artificial Sequence: Synthetic gluten; 5' sequence + inner sequence + 3'  sequence
tagggaagagaaggacatatgatggactgaacgacccctagatatggacgagattgactagtacatgaccacttga

SEQ ID NO: 43674 - DNA, 76 bp, Artificial Sequence
  Description of Artificial Sequence: Synthetic gluten; 5' sequence + inner sequence + 3'  sequence
tagggaagagaaggacatatgatgccacatcgtccctagcaagcaggcttgtattgactagtacatgaccacttga

SEQ ID NO: 43675 - DNA, 76 bp, Artificial Sequence
  Description of Artificial Sequence: Synthetic gluten; 5' sequence + inner sequence + 3'  sequence
tagggaagagaaggacatatgattgagatggcctgatcggaaagtacgacgtattgactagtacatgaccacttga

SEQ ID NO: 43676 - DNA, 76 bp, Artificial Sequence
  Description of Artificial Sequence: Synthetic gluten; 5' sequence + inner sequence + 3'  sequence
tagggaagagaaggacatatgatccgacgatgaaccaaccatgctactttggcttgactagtacatgaccacttga

SEQ ID NO: 43677 - DNA, 76 bp, Artificial Sequence
  Description of Artificial Sequence: Synthetic gluten; 5' sequence + inner sequence + 3'  sequence
tagggaagagaaggacatatgatcacaacgtgcgaaataggactgatcgagccttgactagtacatgaccacttga

SEQ ID NO: 43678 - DNA, 76 bp, Artificial Sequence
  Description of Artificial Sequence: Synthetic gluten; 5' sequence + inner sequence + 3'  sequence
tagggaagagaaggacatatgatcatgacggacagcagctcttagtaggcatattgactagtacatgaccacttga

SEQ ID NO: 43679 - DNA, 76 bp, Artificial Sequence
  Description of Artificial Sequence: Synthetic gluten; 5' sequence + inner sequence + 3'  sequence
tagggaagagaaggacatatgatggactgaacgaaccggtaagaacatgggaattgactagtacatgaccacttga

SEQ ID NO: 43680 - DNA, 76 bp, Artificial Sequence
  Description of Artificial Sequence: Synthetic gluten; 5' sequence + inner sequence + 3'  sequence
tagggaagagaaggacatatgatcatgtacccaacactagccaccggggcatattgactagtacatgaccacttga

SEQ ID NO: 43681 - DNA, 76 bp, Artificial Sequence
  Description of Artificial Sequence: Synthetic gluten; 5' sequence + inner sequence + 3'  sequence
tagggaagagaaggacatatgatgtgcggaacgagcccttcgagtgccatggattgactagtacatgaccacttga

SEQ ID NO: 43682 - DNA, 76 bp, Artificial Sequence
  Description of Artificial Sequence: Synthetic gluten; 5' sequence + inner sequence + 3'  sequence
tagggaagagaaggacatatgattacacattggccgacgattcactaaggacattgactagtacatgaccacttga

SEQ ID NO: 43683 - DNA, 71 bp, Artificial Sequence
  Description of Artificial Sequence: Synthetic gluten; 5' sequence + inner sequence + 3'  sequence
tagggaagagaaggacatatgatggcatgcgatggatgtgtgcatgtattgactagtacatgaccacttga

SEQ ID NO: 43684 - DNA, 76 bp, Artificial Sequence
  Description of Artificial Sequence: Synthetic gluten; 5' sequence + inner sequence + 3'  sequence
tagggaagagaaggacatatgatccgatcgacacctgggactgatctgacatattgactagtacatgaccacttga

SEQ ID NO: 43685 - DNA, 76 bp, Artificial Sequence; identical to SEQ ID NO: 3406
  Description of Artificial Sequence: Synthetic gluten; 5' sequence + inner sequence + 3'  sequence

SEQ ID NO: 43686 - DNA, 76 bp, Artificial Sequence
  Description of Artificial Sequence: Synthetic gluten; 5' sequence + inner sequence + 3'  sequence
tagggaagagaaggacatatgatcatgtgacggaaaagagcggtatcgtcatattgactagtacatgaccacttga

SEQ ID NO: 43687 - DNA, 77 bp, Artificial Sequence
  Description of Artificial Sequence: Synthetic gluten; 5' sequence + inner sequence + 3'  sequence
tagggaagagaaggacatatgatacacatggcatgagcgatccttcaggtgggattgactagtacatgaccacttga

SEQ ID NO: 43688 - DNA, 76 bp, Artificial Sequence
  Description of Artificial Sequence: Synthetic gluten; 5' sequence + inner sequence + 3'  sequence
tagggaagagaaggacatatgatcgaacgcaagctcgagacaatggcattcgattgactagtacatgaccacttga

SEQ ID NO: 43689 - DNA, 76 bp, Artificial Sequence; identical to SEQ ID NO: 3478
  Description of Artificial Sequence: Synthetic gluten; 5' sequence + inner sequence + 3'  sequence

SEQ ID NO: 43690 - DNA, 76 bp, Artificial Sequence; identical to SEQ ID NO: 3092
  Description of Artificial Sequence: Synthetic gluten; 5' sequence + inner sequence + 3'  sequence

SEQ ID NO: 43691 - DNA, 76 bp, Artificial Sequence
  Description of Artificial Sequence: Synthetic gluten; 5' sequence + inner sequence + 3'  sequence
tagggaagagaaggacatatgataatgtgcccgctgattcccttcgagtgtcattgactagtacatgaccacttga

SEQ ID NO: 43692 - DNA, 76 bp, Artificial Sequence
  Description of Artificial Sequence: Synthetic gluten; 5' sequence + inner sequence + 3'  sequence
tagggaagagaaggacatatgatacattggacggaacgacccttcaagcgtgcttgactagtacatgaccacttga

SEQ ID NO: 43693 - DNA, 76 bp, Artificial Sequence; identical to SEQ ID NO: 15872
  Description of Artificial Sequence: Synthetic gluten; 5' sequence + inner sequence + 3'  sequence

SEQ ID NO: 43694 - DNA, 76 bp, Artificial Sequence
  Description of Artificial Sequence: Synthetic gluten; 5' sequence + inner sequence + 3'  sequence
tagggaagagaaggacatatgatgtgcgaacacgagcctatcaaggaggcatgttgactagtacatgaccacttga

SEQ ID NO: 43695 - DNA, 76 bp, Artificial Sequence
  Description of Artificial Sequence: Synthetic gluten; 5' sequence + inner sequence + 3'  sequence
tagggaagagaaggacatatgatgtacgatcgcaccctaggcatgtcgacgctttgactagtacatgaccacttga

SEQ ID NO: 43696 - DNA, 76 bp, Artificial Sequence
  Description of Artificial Sequence: Synthetic gluten; 5' sequence + inner sequence + 3'  sequence
tagggaagagaaggacatatgatacgatcgcaccatcaagtcggccttggacattgactagtacatgaccacttga

SEQ ID NO: 43697 - DNA, 76 bp, Artificial Sequence
  Description of Artificial Sequence: Synthetic gluten; 5' sequence + inner sequence + 3'  sequence
tagggaagagaaggacatatgatggccgagcttcccgagtcaaatgctaggcgttgactagtacatgaccacttga

SEQ ID NO: 43698 - DNA, 76 bp, Artificial Sequence
  Description of Artificial Sequence: Synthetic gluten; 5' sequence + inner sequence + 3'  sequence
tagggaagagaaggacatatgatcgtgtacgaatctagcaccgcgttggcatattgactagtacatgaccacttga

SEQ ID NO: 43699 - DNA, 76 bp, Artificial Sequence; identical to SEQ ID NO: 7881
  Description of Artificial Sequence: Synthetic gluten; 5' sequence + inner sequence + 3'  sequence

SEQ ID NO: 43700 - DNA, 76 bp, Artificial Sequence
  Description of Artificial Sequence: Synthetic gluten; 5' sequence + inner sequence + 3'  sequence
tagggaagagaaggacatatgatggccgacctggatgcgagcatgcatctagtttgactagtacatgaccacttga

SEQ ID NO: 43701 - DNA, 76 bp, Artificial Sequence
  Description of Artificial Sequence: Synthetic gluten; 5' sequence + inner sequence + 3'  sequence
tagggaagagaaggacatatgatggacggatcgaacctacaaggtgtcgtggattgactagtacatgaccacttga

SEQ ID NO: 43702 - DNA, 76 bp, Artificial Sequence
  Description of Artificial Sequence: Synthetic gluten; 5' sequence + inner sequence + 3'  sequence
tagggaagagaaggacatatgatggcattcgatgcactacaagatgttgtgtattgactagtacatgaccacttga

SEQ ID NO: 43703 - DNA, 76 bp, Artificial Sequence
  Description of Artificial Sequence: Synthetic gluten; 5' sequence + inner sequence + 3'  sequence
tagggaagagaaggacatatgatggcattcgatgcaccttcgtcagtctgtcattgactagtacatgaccacttga

SEQ ID NO: 43704 - DNA, 76 bp, Artificial Sequence
  Description of Artificial Sequence: Synthetic gluten; 5' sequence + inner sequence + 3'  sequence
tagggaagagaaggacatatgatgagaacgcaggacaaatctatgggctgatcttgactagtacatgaccacttga

SEQ ID NO: 43705 - DNA, 76 bp, Artificial Sequence
  Description of Artificial Sequence: Synthetic gluten; 5' sequence + inner sequence + 3'  sequence
tagggaagagaaggacatatgatccgactcggaactagggaattggcgcagtcttgactagtacatgaccacttga

SEQ ID NO: 43706 - DNA, 76 bp, Artificial Sequence; identical to SEQ ID NO: 31406
  Description of Artificial Sequence: Synthetic gluten; 5' sequence + inner sequence + 3'  sequence

SEQ ID NO: 43707 - DNA, 76 bp, Artificial Sequence
  Description of Artificial Sequence: Synthetic gluten; 5' sequence + inner sequence + 3'  sequence
tagggaagagaaggacatatgatcaacaggaactgctggcctttatgtcactattgactagtacatgaccacttga

SEQ ID NO: 43708 - DNA, 76 bp, Artificial Sequence; identical to SEQ ID NO: 35332
  Description of Artificial Sequence: Synthetic gluten; 5' sequence + inner sequence + 3'  sequence

SEQ ID NO: 43709 - DNA, 76 bp, Artificial Sequence; identical to SEQ ID NO: 3026
  Description of Artificial Sequence: Synthetic gluten; 5' sequence + inner sequence + 3'  sequence

SEQ ID NO: 43710 - DNA, 77 bp, Artificial Sequence
  Description of Artificial Sequence: Synthetic gluten; 5' sequence + inner sequence + 3'  sequence
tagggaagagaaggacatatgatgtccgactcggcccgaagaacttgtcacagcttgactagtacatgaccacttga

SEQ ID NO: 43711 - DNA, 76 bp, Artificial Sequence
  Description of Artificial Sequence: Synthetic gluten; 5' sequence + inner sequence + 3'  sequence
tagggaagagaaggacatatgatccgacgacgccctgaaaggcaggcacgtacttgactagtacatgaccacttga

SEQ ID NO: 43712 - DNA, 76 bp, Artificial Sequence; identical to SEQ ID NO: 31600
  Description of Artificial Sequence: Synthetic gluten; 5' sequence + inner sequence + 3'  sequence

SEQ ID NO: 43713 - DNA, 76 bp, Artificial Sequence
  Description of Artificial Sequence: Synthetic gluten; 5' sequence + inner sequence + 3'  sequence
tagggaagagaaggacatatgattgttcacaaccctactggtcactcgcttcattgactagtacatgaccacttga

SEQ ID NO: 43714 - DNA, 76 bp, Artificial Sequence; identical to SEQ ID NO: 3237
  Description of Artificial Sequence: Synthetic gluten; 5' sequence + inner sequence + 3'  sequence

SEQ ID NO: 43715 - DNA, 76 bp, Artificial Sequence
  Description of Artificial Sequence: Synthetic gluten; 5' sequence + inner sequence + 3'  sequence
tagggaagagaaggacatatgatggcctgaacttcccgtagtacgtgtcatttttgactagtacatgaccacttga

SEQ ID NO: 43716 - DNA, 76 bp, Artificial Sequence; identical to SEQ ID NO: 39179
  Description of Artificial Sequence: Synthetic gluten; 5' sequence + inner sequence + 3'  sequence

SEQ ID NO: 43717 - DNA, 76 bp, Artificial Sequence
  Description of Artificial Sequence: Synthetic gluten; 5' sequence + inner sequence + 3'  sequence
tagggaagagaaggacatatgatgtacttcgactgcctatcaagtcgcatgtattgactagtacatgaccacttga

SEQ ID NO: 43718 - DNA, 76 bp, Artificial Sequence
  Description of Artificial Sequence: Synthetic gluten; 5' sequence + inner sequence + 3'  sequence
tagggaagagaaggacatatgatacgagccggagagaatggcaaagcgtgctattgactagtacatgaccacttga

SEQ ID NO: 43719 - DNA, 76 bp, Artificial Sequence
  Description of Artificial Sequence: Synthetic gluten; 5' sequence + inner sequence + 3'  sequence
tagggaagagaaggacatatgatgacgcacgcctccctagggacatgcacgtattgactagtacatgaccacttga

SEQ ID NO: 43720 - DNA, 76 bp, Artificial Sequence
  Description of Artificial Sequence: Synthetic gluten; 5' sequence + inner sequence + 3'  sequence
tagggaagagaaggacatatgatggacggatcgaacctacaagatgtcgtggattgactagtacatgaccacttga

SEQ ID NO: 43721 - DNA, 76 bp, Artificial Sequence
  Description of Artificial Sequence: Synthetic gluten; 5' sequence + inner sequence + 3'  sequence
tagggaagagaaggacatatgatatcgattggcagaaagtcgtaacggcaatattgactagtacatgaccacttga

SEQ ID NO: 43722 - DNA, 76 bp, Artificial Sequence
  Description of Artificial Sequence: Synthetic gluten; 5' sequence + inner sequence + 3'  sequence
tagggaagagaaggacatatgatcacagaacgcgacgaagttatgtctcacacttgactagtacatgaccacttga

SEQ ID NO: 43723 - DNA, 76 bp, Artificial Sequence
  Description of Artificial Sequence: Synthetic gluten; 5' sequence + inner sequence + 3'  sequence
tagggaagagaaggacatatgattggaccgagcgacctgtactcatcacagcgttgactagtacatgaccacttga

SEQ ID NO: 43724 - DNA, 76 bp, Artificial Sequence; identical to SEQ ID NO: 3131
  Description of Artificial Sequence: Synthetic gluten; 5' sequence + inner sequence + 3'  sequence

SEQ ID NO: 43725 - DNA, 76 bp, Artificial Sequence
  Description of Artificial Sequence: Synthetic gluten; 5' sequence + inner sequence + 3'  sequence
tagggaagagaaggacatatgatgtacgcacacgaccctcaagagtgcatggattgactagtacatgaccacttga

SEQ ID NO: 43726 - DNA, 76 bp, Artificial Sequence
  Description of Artificial Sequence: Synthetic gluten; 5' sequence + inner sequence + 3'  sequence
tagggaagagaaggacatatgatccgagcgcgacctaaagagagaagtactgcttgactagtacatgaccacttga

SEQ ID NO: 43727 - DNA, 76 bp, Artificial Sequence
  Description of Artificial Sequence: Synthetic gluten; 5' sequence + inner sequence + 3'  sequence
tagggaagagaaggacatatgatactttcgctgaacgttgaatagagcgatcattgactagtacatgaccacttga

SEQ ID NO: 43728 - DNA, 76 bp, Artificial Sequence
  Description of Artificial Sequence: Synthetic gluten; 5' sequence + inner sequence + 3'  sequence
tagggaagagaaggacatatgatgtacaatctggcctagcaagtgcgtatgtattgactagtacatgaccacttga

SEQ ID NO: 43729 - DNA, 76 bp, Artificial Sequence
  Description of Artificial Sequence: Synthetic gluten; 5' sequence + inner sequence + 3'  sequence
tagggaagagaaggacatatgatagcgacagagccgaagagaaaggcaatttattgactagtacatgaccacttga

SEQ ID NO: 43730 - DNA, 76 bp, Artificial Sequence
  Description of Artificial Sequence: Synthetic gluten; 5' sequence + inner sequence + 3'  sequence
tagggaagagaaggacatatgatggccacgacatcagatgaacttgtctggatttgactagtacatgaccacttga

SEQ ID NO: 43731 - DNA, 76 bp, Artificial Sequence
  Description of Artificial Sequence: Synthetic gluten; 5' sequence + inner sequence + 3'  sequence
tagggaagagaaggacatatgattgaacaccgtcaaccataatggacgcgctcttgactagtacatgaccacttga

SEQ ID NO: 43732 - DNA, 75 bp, Artificial Sequence
  Description of Artificial Sequence: Synthetic gluten; 5' sequence + inner sequence + 3'  sequence
tagggaagagaaggacatatgattggcctgagcgaccatggactgacgtagtttgactagtacatgaccacttga

SEQ ID NO: 43733 - DNA, 76 bp, Artificial Sequence; identical to SEQ ID NO: 3213
  Description of Artificial Sequence: Synthetic gluten; 5' sequence + inner sequence + 3'  sequence

SEQ ID NO: 43734 - DNA, 76 bp, Artificial Sequence
  Description of Artificial Sequence: Synthetic gluten; 5' sequence + inner sequence + 3'  sequence
tagggaagagaaggacatatgatcgagactagagccgaagattcagtcagaatttgactagtacatgaccacttga

SEQ ID NO: 43735 - DNA, 76 bp, Artificial Sequence
  Description of Artificial Sequence: Synthetic gluten; 5' sequence + inner sequence + 3'  sequence
tagggaagagaaggacatatgatatggccgccgctgaacatggattagtcatattgactagtacatgaccacttga

SEQ ID NO: 43736 - DNA, 76 bp, Artificial Sequence
  Description of Artificial Sequence: Synthetic gluten; 5' sequence + inner sequence + 3'  sequence
tagggaagagaaggacatatgatggccggaacgccactcaagtcgtgatgtgcttgactagtacatgaccacttga

SEQ ID NO: 43737 - DNA, 76 bp, Artificial Sequence
  Description of Artificial Sequence: Synthetic gluten; 5' sequence + inner sequence + 3'  sequence
tagggaagagaaggacatatgatctgaacgaccgagctgagaacatggatagattgactagtacatgaccacttga

SEQ ID NO: 43738 - DNA, 76 bp, Artificial Sequence
  Description of Artificial Sequence: Synthetic gluten; 5' sequence + inner sequence + 3'  sequence
tagggaagagaaggacatatgatcctgagcgaaccctagtagtaggcactgtattgactagtacatgaccacttga

SEQ ID NO: 43739 - DNA, 76 bp, Artificial Sequence
  Description of Artificial Sequence: Synthetic gluten; 5' sequence + inner sequence + 3'  sequence
tagggaagagaaggacatatgatccgaagatggacgaaaggtgaggtacgatgttgactagtacatgaccacttga

SEQ ID NO: 43740 - DNA, 76 bp, Artificial Sequence
  Description of Artificial Sequence: Synthetic gluten; 5' sequence + inner sequence + 3'  sequence
tagggaagagaaggacatatgatggcatgcgaaacaagttcacacccgtcgctttgactagtacatgaccacttga

SEQ ID NO: 43741 - DNA, 76 bp, Artificial Sequence; identical to SEQ ID NO: 3118
  Description of Artificial Sequence: Synthetic gluten; 5' sequence + inner sequence + 3'  sequence

SEQ ID NO: 43742 - DNA, 76 bp, Artificial Sequence; identical to SEQ ID NO: 7605
  Description of Artificial Sequence: Synthetic gluten; 5' sequence + inner sequence + 3'  sequence

SEQ ID NO: 43743 - DNA, 76 bp, Artificial Sequence; identical to SEQ ID NO: 27877
  Description of Artificial Sequence: Synthetic gluten; 5' sequence + inner sequence + 3'  sequence

SEQ ID NO: 43744 - DNA, 76 bp, Artificial Sequence
  Description of Artificial Sequence: Synthetic gluten; 5' sequence + inner sequence + 3'  sequence
tagggaagagaaggacatatgatatggacttgcgaagggttctaacgctaacattgactagtacatgaccacttga

SEQ ID NO: 43745 - DNA, 76 bp, Artificial Sequence
  Description of Artificial Sequence: Synthetic gluten; 5' sequence + inner sequence + 3'  sequence
tagggaagagaaggacatatgatcgaactggcatagttagattcgtacctggcttgactagtacatgaccacttga

SEQ ID NO: 43746 - DNA, 76 bp, Artificial Sequence
  Description of Artificial Sequence: Synthetic gluten; 5' sequence + inner sequence + 3'  sequence
tagggaagagaaggacatatgatccgcactcggacctcaagtgtacgacggcattgactagtacatgaccacttga

SEQ ID NO: 43747 - DNA, 76 bp, Artificial Sequence
  Description of Artificial Sequence: Synthetic gluten; 5' sequence + inner sequence + 3'  sequence
tagggaagagaaggacatatgatacatatggccgaccgagtcactgcaatggattgactagtacatgaccacttga

SEQ ID NO: 43748 - DNA, 76 bp, Artificial Sequence
  Description of Artificial Sequence: Synthetic gluten; 5' sequence + inner sequence + 3'  sequence
tagggaagagaaggacatatgatcattcgatgagcgtaggcagactaggcaggttgactagtacatgaccacttga

SEQ ID NO: 43749 - DNA, 76 bp, Artificial Sequence
  Description of Artificial Sequence: Synthetic gluten; 5' sequence + inner sequence + 3'  sequence
tagggaagagaaggacatatgatggcctgatcgaaactagagagtggcgtggattgactagtacatgaccacttga

SEQ ID NO: 43750 - DNA, 76 bp, Artificial Sequence
  Description of Artificial Sequence: Synthetic gluten; 5' sequence + inner sequence + 3'  sequence
tagggaagagaaggacatatgattaggtccgaagcgcaatgtaataggcactattgactagtacatgaccacttga

SEQ ID NO: 43751 - DNA, 76 bp, Artificial Sequence
  Description of Artificial Sequence: Synthetic gluten; 5' sequence + inner sequence + 3'  sequence
tagggaagagaaggacatatgatggactgagcgacggaatgcactggtcaattttgactagtacatgaccacttga

SEQ ID NO: 43752 - DNA, 76 bp, Artificial Sequence
  Description of Artificial Sequence: Synthetic gluten; 5' sequence + inner sequence + 3'  sequence
tagggaagagaaggacatatgatggcctgcgatggatgaggagctgcactagtttgactagtacatgaccacttga

SEQ ID NO: 43753 - DNA, 76 bp, Artificial Sequence
  Description of Artificial Sequence: Synthetic gluten; 5' sequence + inner sequence + 3'  sequence
tagggaagagaaggacatatgatccgatcgaccgatgtcattctacggcagcattgactagtacatgaccacttga

SEQ ID NO: 43754 - DNA, 76 bp, Artificial Sequence
  Description of Artificial Sequence: Synthetic gluten; 5' sequence + inner sequence + 3'  sequence
tagggaagagaaggacatatgatggccgaacgcacacgagcgagatgtcaactttgactagtacatgaccacttga

SEQ ID NO: 43755 - DNA, 76 bp, Artificial Sequence
  Description of Artificial Sequence: Synthetic gluten; 5' sequence + inner sequence + 3'  sequence
tagggaagagaaggacatatgatcattcgcgacccgtacatgggattgacgtattgactagtacatgaccacttga

SEQ ID NO: 43756 - DNA, 76 bp, Artificial Sequence
  Description of Artificial Sequence: Synthetic gluten; 5' sequence + inner sequence + 3'  sequence
tagggaagagaaggacatatgatatggccgaatcgccacaagagcatgtcgaattgactagtacatgaccacttga

SEQ ID NO: 43757 - DNA, 76 bp, Artificial Sequence
  Description of Artificial Sequence: Synthetic gluten; 5' sequence + inner sequence + 3'  sequence
tagggaagagaaggacatatgatccttcgcgaaccgtgtcagcgtacgatggcttgactagtacatgaccacttga

SEQ ID NO: 43758 - DNA, 76 bp, Artificial Sequence
  Description of Artificial Sequence: Synthetic gluten; 5' sequence + inner sequence + 3'  sequence
tagggaagagaaggacatatgatcgtaccgagtcagccgtaggtcactgtggattgactagtacatgaccacttga

SEQ ID NO: 43759 - DNA, 76 bp, Artificial Sequence
  Description of Artificial Sequence: Synthetic gluten; 5' sequence + inner sequence + 3'  sequence
tagggaagagaaggacatatgatggcatgcgaggaactagcaagtcgttcgtgttgactagtacatgaccacttga

SEQ ID NO: 43760 - DNA, 76 bp, Artificial Sequence
  Description of Artificial Sequence: Synthetic gluten; 5' sequence + inner sequence + 3'  sequence
tagggaagagaaggacatatgatcgcgcatgcaaagaagagccgaagatccctttgactagtacatgaccacttga

SEQ ID NO: 43761 - DNA, 76 bp, Artificial Sequence
  Description of Artificial Sequence: Synthetic gluten; 5' sequence + inner sequence + 3'  sequence
tagggaagagaaggacatatgatccatctcgccccgtcaatgtgatcatgcacttgactagtacatgaccacttga

SEQ ID NO: 43762 - DNA, 76 bp, Artificial Sequence
  Description of Artificial Sequence: Synthetic gluten; 5' sequence + inner sequence + 3'  sequence
tagggaagagaaggacatatgatgcagtcagatggacgacgagttcactaggtttgactagtacatgaccacttga

SEQ ID NO: 43763 - DNA, 76 bp, Artificial Sequence
  Description of Artificial Sequence: Synthetic gluten; 5' sequence + inner sequence + 3'  sequence
tagggaagagaaggacatatgatggcatgcgctgggtagtgatcacgtacggcttgactagtacatgaccacttga

SEQ ID NO: 43764 - DNA, 76 bp, Artificial Sequence
  Description of Artificial Sequence: Synthetic gluten; 5' sequence + inner sequence + 3'  sequence
tagggaagagaaggacatatgatggccgacctggatgtgagcatgcatctagattgactagtacatgaccacttga

SEQ ID NO: 43765 - DNA, 76 bp, Artificial Sequence; identical to SEQ ID NO: 7924
  Description of Artificial Sequence: Synthetic gluten; 5' sequence + inner sequence + 3'  sequence

SEQ ID NO: 43766 - DNA, 77 bp, Artificial Sequence
  Description of Artificial Sequence: Synthetic gluten; 5' sequence + inner sequence + 3'  sequence
tagggaagagaaggacatatgatggcctgcgatggatgtgatcgtgcaatagtcttgactagtacatgaccacttga

SEQ ID NO: 43767 - DNA, 76 bp, Artificial Sequence
  Description of Artificial Sequence: Synthetic gluten; 5' sequence + inner sequence + 3'  sequence
tagggaagagaaggacatatgattgtcctgcgcgacctacgagtgggatggtattgactagtacatgaccacttga

SEQ ID NO: 43768 - DNA, 76 bp, Artificial Sequence
  Description of Artificial Sequence: Synthetic gluten; 5' sequence + inner sequence + 3'  sequence
tagggaagagaaggacatatgatcgcacctactacatgcattaataaggtgtattgactagtacatgaccacttga

SEQ ID NO: 43769 - DNA, 76 bp, Artificial Sequence
  Description of Artificial Sequence: Synthetic gluten; 5' sequence + inner sequence + 3'  sequence
tagggaagagaaggacatatgatgaacgcacgatgagcgccaagtgacatggattgactagtacatgaccacttga

SEQ ID NO: 43770 - DNA, 76 bp, Artificial Sequence
  Description of Artificial Sequence: Synthetic gluten; 5' sequence + inner sequence + 3'  sequence
tagggaagagaaggacatatgatggcctgctcgaacctagagagtggcgtggattgactagtacatgaccacttga

SEQ ID NO: 43771 - DNA, 76 bp, Artificial Sequence
  Description of Artificial Sequence: Synthetic gluten; 5' sequence + inner sequence + 3'  sequence
tagggaagagaaggacatatgatatggacgaacgagcccaagtgcgccatggattgactagtacatgaccacttga

SEQ ID NO: 43772 - DNA, 76 bp, Artificial Sequence; identical to SEQ ID NO: 39546
  Description of Artificial Sequence: Synthetic gluten; 5' sequence + inner sequence + 3'  sequence

SEQ ID NO: 43773 - DNA, 76 bp, Artificial Sequence
  Description of Artificial Sequence: Synthetic gluten; 5' sequence + inner sequence + 3'  sequence
tagggaagagaaggacatatgataggccgcactcgtcacgcaatggccatggattgactagtacatgaccacttga

SEQ ID NO: 43774 - DNA, 76 bp, Artificial Sequence
  Description of Artificial Sequence: Synthetic gluten; 5' sequence + inner sequence + 3'  sequence
tagggaagagaaggacatatgatggcatgcgaagtccagtggattgtgctcgtttgactagtacatgaccacttga

SEQ ID NO: 43775 - DNA, 76 bp, Artificial Sequence
  Description of Artificial Sequence: Synthetic gluten; 5' sequence + inner sequence + 3'  sequence
tagggaagagaaggacatatgatcatgcacgaactaacaggggactcctcatattgactagtacatgaccacttga

SEQ ID NO: 43776 - DNA, 76 bp, Artificial Sequence
  Description of Artificial Sequence: Synthetic gluten; 5' sequence + inner sequence + 3'  sequence
tagggaagagaaggacatatgatccatcagatggccgagtcgagtgatggtcgttgactagtacatgaccacttga

SEQ ID NO: 43777 - DNA, 75 bp, Artificial Sequence
  Description of Artificial Sequence: Synthetic gluten; 5' sequence + inner sequence + 3'  sequence
tagggaagagaaggacatatgatccaatcacatggccgatctggatgtgtgtttgactagtacatgaccacttga

SEQ ID NO: 43778 - DNA, 76 bp, Artificial Sequence
  Description of Artificial Sequence: Synthetic gluten; 5' sequence + inner sequence + 3'  sequence
tagggaagagaaggacatatgatcttcccgcagaacatggcccgaacgtcatcttgactagtacatgaccacttga

SEQ ID NO: 43779 - DNA, 76 bp, Artificial Sequence
  Description of Artificial Sequence: Synthetic gluten; 5' sequence + inner sequence + 3'  sequence
tagggaagagaaggacatatgatccgatcgaccaaagaacatcgtgcgacggtttgactagtacatgaccacttga

SEQ ID NO: 43780 - DNA, 76 bp, Artificial Sequence
  Description of Artificial Sequence: Synthetic gluten; 5' sequence + inner sequence + 3'  sequence
tagggaagagaaggacatatgatgtcatgcgcgtaccgtcaagtgcgaatggattgactagtacatgaccacttga

SEQ ID NO: 43781 - DNA, 76 bp, Artificial Sequence
  Description of Artificial Sequence: Synthetic gluten; 5' sequence + inner sequence + 3'  sequence
tagggaagagaaggacatatgattggcctgcgagtacctgtgatagtccttgattgactagtacatgaccacttga

SEQ ID NO: 43782 - DNA, 76 bp, Artificial Sequence
  Description of Artificial Sequence: Synthetic gluten; 5' sequence + inner sequence + 3'  sequence
tagggaagagaaggacatatgatgtcattcgctgaacgttcaagggacgtggattgactagtacatgaccacttga

SEQ ID NO: 43783 - DNA, 76 bp, Artificial Sequence
  Description of Artificial Sequence: Synthetic gluten; 5' sequence + inner sequence + 3'  sequence
tagggaagagaaggacatatgatcatgtcgccaagagcacgtatgtcgtcatattgactagtacatgaccacttga

SEQ ID NO: 43784 - DNA, 76 bp, Artificial Sequence
  Description of Artificial Sequence: Synthetic gluten; 5' sequence + inner sequence + 3'  sequence
tagggaagagaaggacatatgatggcatgcgctgggtagcgatcacgtacggtttgactagtacatgaccacttga

SEQ ID NO: 43785 - DNA, 76 bp, Artificial Sequence
  Description of Artificial Sequence: Synthetic gluten; 5' sequence + inner sequence + 3'  sequence
tagggaagagaaggacatatgatccgaagcgagcctaggtctttacgctggctttgactagtacatgaccacttga

SEQ ID NO: 43786 - DNA, 76 bp, Artificial Sequence
  Description of Artificial Sequence: Synthetic gluten; 5' sequence + inner sequence + 3'  sequence
tagggaagagaaggacatatgatacaatcacaattgacaaaacgtgcatgctgttgactagtacatgaccacttga

SEQ ID NO: 43787 - DNA, 76 bp, Artificial Sequence
  Description of Artificial Sequence: Synthetic gluten; 5' sequence + inner sequence + 3'  sequence
tagggaagagaaggacatatgatcgcacgttacggaggataacggtatgggtattgactagtacatgaccacttga

SEQ ID NO: 43788 - DNA, 76 bp, Artificial Sequence
  Description of Artificial Sequence: Synthetic gluten; 5' sequence + inner sequence + 3'  sequence
tagggaagagaaggacatatgatggactgaacgcaccgaaatgtcaggacgcattgactagtacatgaccacttga

SEQ ID NO: 43789 - DNA, 76 bp, Artificial Sequence
  Description of Artificial Sequence: Synthetic gluten; 5' sequence + inner sequence + 3'  sequence
tagggaagagaaggacatatgatccgacaatgaccgtaatgagagcatgcgacttgactagtacatgaccacttga

SEQ ID NO: 43790 - DNA, 76 bp, Artificial Sequence
  Description of Artificial Sequence: Synthetic gluten; 5' sequence + inner sequence + 3'  sequence
tagggaagagaaggacatatgatccgttgatggactaaaggtgactactaagcttgactagtacatgaccacttga

SEQ ID NO: 43791 - DNA, 76 bp, Artificial Sequence
  Description of Artificial Sequence: Synthetic gluten; 5' sequence + inner sequence + 3'  sequence
tagggaagagaaggacatatgatggcctgcgctgggtagtgatcacgtacggtttgactagtacatgaccacttga

SEQ ID NO: 43792 - DNA, 76 bp, Artificial Sequence
  Description of Artificial Sequence: Synthetic gluten; 5' sequence + inner sequence + 3'  sequence
tagggaagagaaggacatatgatcaacaccactgcagtagattatggctcacgttgactagtacatgaccacttga

SEQ ID NO: 43793 - DNA, 75 bp, Artificial Sequence
  Description of Artificial Sequence: Synthetic gluten; 5' sequence + inner sequence + 3'  sequence
tagggaagagaaggacatatgattggccaagcgacctagcaagtgcagcatgttgactagtacatgaccacttga

SEQ ID NO: 43794 - DNA, 76 bp, Artificial Sequence
  Description of Artificial Sequence: Synthetic gluten; 5' sequence + inner sequence + 3'  sequence
tagggaagagaaggacatatgatacgtccgacgaatgaggactagaggttgggttgactagtacatgaccacttga

SEQ ID NO: 43795 - DNA, 76 bp, Artificial Sequence; identical to SEQ ID NO: 3364
  Description of Artificial Sequence: Synthetic gluten; 5' sequence + inner sequence + 3'  sequence

SEQ ID NO: 43796 - DNA, 76 bp, Artificial Sequence
  Description of Artificial Sequence: Synthetic gluten; 5' sequence + inner sequence + 3'  sequence
tagggaagagaaggacatatgatggccggctataccctacacgtgatcaggtattgactagtacatgaccacttga

SEQ ID NO: 43797 - DNA, 75 bp, Artificial Sequence
  Description of Artificial Sequence: Synthetic gluten; 5' sequence + inner sequence + 3'  sequence
tagggaagagaaggacatatgatgtacgacgcggaccttcaagtcggccatgttgactagtacatgaccacttga

SEQ ID NO: 43798 - DNA, 76 bp, Artificial Sequence
  Description of Artificial Sequence: Synthetic gluten; 5' sequence + inner sequence + 3'  sequence
tagggaagagaaggacatatgatcatgtacgctaacggcaagcaatgctcatattgactagtacatgaccacttga

SEQ ID NO: 43799 - DNA, 76 bp, Artificial Sequence
  Description of Artificial Sequence: Synthetic gluten; 5' sequence + inner sequence + 3'  sequence
tagggaagagaaggacatatgatggactgctcagcacaaacgtgggcactggattgactagtacatgaccacttga

SEQ ID NO: 43800 - DNA, 76 bp, Artificial Sequence
  Description of Artificial Sequence: Synthetic gluten; 5' sequence + inner sequence + 3'  sequence
tagggaagagaaggacatatgatggacgacgatgaccggaatcaagcgtgtcattgactagtacatgaccacttga

SEQ ID NO: 43801 - DNA, 76 bp, Artificial Sequence
  Description of Artificial Sequence: Synthetic gluten; 5' sequence + inner sequence + 3'  sequence
tagggaagagaaggacatatgatgtacgcaacgaaccgcaaggggatgtggacttgactagtacatgaccacttga

SEQ ID NO: 43802 - DNA, 76 bp, Artificial Sequence
  Description of Artificial Sequence: Synthetic gluten; 5' sequence + inner sequence + 3'  sequence
tagggaagagaaggacatatgattgacgtgcaggataagaacatggcctgagcttgactagtacatgaccacttga

SEQ ID NO: 43803 - DNA, 76 bp, Artificial Sequence
  Description of Artificial Sequence: Synthetic gluten; 5' sequence + inner sequence + 3'  sequence
tagggaagagaaggacatatgatccgactcggaaaggtacgtacggagattcattgactagtacatgaccacttga

SEQ ID NO: 43804 - DNA, 76 bp, Artificial Sequence; identical to SEQ ID NO: 3684
  Description of Artificial Sequence: Synthetic gluten; 5' sequence + inner sequence + 3'  sequence

SEQ ID NO: 43805 - DNA, 76 bp, Artificial Sequence
  Description of Artificial Sequence: Synthetic gluten; 5' sequence + inner sequence + 3'  sequence
tagggaagagaaggacatatgatccgatcgacctcgtgtcaggtgcacagtcattgactagtacatgaccacttga

SEQ ID NO: 43806 - DNA, 76 bp, Artificial Sequence
  Description of Artificial Sequence: Synthetic gluten; 5' sequence + inner sequence + 3'  sequence
tagggaagagaaggacatatgattcatgccctgaacgctaatggacgacgggattgactagtacatgaccacttga

SEQ ID NO: 43807 - DNA, 76 bp, Artificial Sequence
  Description of Artificial Sequence: Synthetic gluten; 5' sequence + inner sequence + 3'  sequence
tagggaagagaaggacatatgatcgcaccagcgatatgttgattagtacatccttgactagtacatgaccacttga

SEQ ID NO: 43808 - DNA, 76 bp, Artificial Sequence
  Description of Artificial Sequence: Synthetic gluten; 5' sequence + inner sequence + 3'  sequence
tagggaagagaaggacatatgatagtgatcacaaagagcagacttgggcatctttgactagtacatgaccacttga

SEQ ID NO: 43809 - DNA, 76 bp, Artificial Sequence
  Description of Artificial Sequence: Synthetic gluten; 5' sequence + inner sequence + 3'  sequence
tagggaagagaaggacatatgatacgaacagagccgaagagccttaagcaagcttgactagtacatgaccacttga

SEQ ID NO: 43810 - DNA, 76 bp, Artificial Sequence
  Description of Artificial Sequence: Synthetic gluten; 5' sequence + inner sequence + 3'  sequence
tagggaagagaaggacatatgatgcgcagcagcagtagtcatgctctgggatgttgactagtacatgaccacttga

SEQ ID NO: 43811 - DNA, 76 bp, Artificial Sequence
  Description of Artificial Sequence: Synthetic gluten; 5' sequence + inner sequence + 3'  sequence
tagggaagagaaggacatatgattggccgacgattcccgttggacgaggccttttgactagtacatgaccacttga

SEQ ID NO: 43812 - DNA, 76 bp, Artificial Sequence
  Description of Artificial Sequence: Synthetic gluten; 5' sequence + inner sequence + 3'  sequence
tagggaagagaaggacatatgattcaacgtatgcctgaagaggacgcacaaggttgactagtacatgaccacttga

SEQ ID NO: 43813 - DNA, 75 bp, Artificial Sequence; identical to SEQ ID NO: 31887
  Description of Artificial Sequence: Synthetic gluten; 5' sequence + inner sequence + 3'  sequence

SEQ ID NO: 43814 - DNA, 76 bp, Artificial Sequence
  Description of Artificial Sequence: Synthetic gluten; 5' sequence + inner sequence + 3'  sequence
tagggaagagaaggacatatgattcgagcacagatagagcatatggcacgatcttgactagtacatgaccacttga

SEQ ID NO: 43815 - DNA, 76 bp, Artificial Sequence
  Description of Artificial Sequence: Synthetic gluten; 5' sequence + inner sequence + 3'  sequence
tagggaagagaaggacatatgatggacagaacgaccgatcaagtgcgggtgtattgactagtacatgaccacttga

SEQ ID NO: 43816 - DNA, 76 bp, Artificial Sequence
  Description of Artificial Sequence: Synthetic gluten; 5' sequence + inner sequence + 3'  sequence
tagggaagagaaggacatatgatgcacaagtcgccagtctgatccgagctcacttgactagtacatgaccacttga

SEQ ID NO: 43817 - DNA, 76 bp, Artificial Sequence
  Description of Artificial Sequence: Synthetic gluten; 5' sequence + inner sequence + 3'  sequence
tagggaagagaaggacatatgatccgagcggaaactgaattccatgcagtgtcttgactagtacatgaccacttga

SEQ ID NO: 43818 - DNA, 76 bp, Artificial Sequence
  Description of Artificial Sequence: Synthetic gluten; 5' sequence + inner sequence + 3'  sequence
tagggaagagaaggacatatgatccgaacgtacctgagaagcatagtccgatcttgactagtacatgaccacttga

SEQ ID NO: 43819 - DNA, 76 bp, Artificial Sequence
  Description of Artificial Sequence: Synthetic gluten; 5' sequence + inner sequence + 3'  sequence
tagggaagagaaggacatatgatcgtcagcatgacgaagatttgagccggagattgactagtacatgaccacttga

SEQ ID NO: 43820 - DNA, 76 bp, Artificial Sequence
  Description of Artificial Sequence: Synthetic gluten; 5' sequence + inner sequence + 3'  sequence
tagggaagagaaggacatatgatgaactgcgatggaatgggctgtatgcgtctttgactagtacatgaccacttga

SEQ ID NO: 43821 - DNA, 76 bp, Artificial Sequence
  Description of Artificial Sequence: Synthetic gluten; 5' sequence + inner sequence + 3'  sequence
tagggaagagaaggacatatgatcatgtacataccgagacaatcttgttcatattgactagtacatgaccacttga

SEQ ID NO: 43822 - DNA, 76 bp, Artificial Sequence
  Description of Artificial Sequence: Synthetic gluten; 5' sequence + inner sequence + 3'  sequence
tagggaagagaaggacatatgatggcatgcgatgcactacaagttgttgtgtattgactagtacatgaccacttga

SEQ ID NO: 43823 - DNA, 76 bp, Artificial Sequence
  Description of Artificial Sequence: Synthetic gluten; 5' sequence + inner sequence + 3'  sequence
tagggaagagaaggacatatgatccgaacgcgcccttcaagtgcatggctgtcttgactagtacatgaccacttga

SEQ ID NO: 43824 - DNA, 76 bp, Artificial Sequence
  Description of Artificial Sequence: Synthetic gluten; 5' sequence + inner sequence + 3'  sequence
tagggaagagaaggacatatgatggcctgatcgaacctcaagctggacatggattgactagtacatgaccacttga

SEQ ID NO: 43825 - DNA, 76 bp, Artificial Sequence
  Description of Artificial Sequence: Synthetic gluten; 5' sequence + inner sequence + 3'  sequence
tagggaagagaaggacatatgatggcctgagctgcactagtagagtcaaattattgactagtacatgaccacttga

SEQ ID NO: 43826 - DNA, 76 bp, Artificial Sequence
  Description of Artificial Sequence: Synthetic gluten; 5' sequence + inner sequence + 3'  sequence
tagggaagagaaggacatatgatcgtaccgcaagtgacgtgtccgtgccgggattgactagtacatgaccacttga

SEQ ID NO: 43827 - DNA, 76 bp, Artificial Sequence
  Description of Artificial Sequence: Synthetic gluten; 5' sequence + inner sequence + 3'  sequence
tagggaagagaaggacatatgatcctgagcgaccgtagacctgtctagacacattgactagtacatgaccacttga

SEQ ID NO: 43828 - DNA, 76 bp, Artificial Sequence; identical to SEQ ID NO: 7721
  Description of Artificial Sequence: Synthetic gluten; 5' sequence + inner sequence + 3'  sequence

SEQ ID NO: 43829 - DNA, 76 bp, Artificial Sequence
  Description of Artificial Sequence: Synthetic gluten; 5' sequence + inner sequence + 3'  sequence
tagggaagagaaggacatatgatggacgcaacgtaccgcatcgtggccatgtgttgactagtacatgaccacttga

SEQ ID NO: 43830 - DNA, 76 bp, Artificial Sequence
  Description of Artificial Sequence: Synthetic gluten; 5' sequence + inner sequence + 3'  sequence
tagggaagagaaggacatatgatccgcacagggcattgaaaatctcctacggcttgactagtacatgaccacttga

SEQ ID NO: 43831 - DNA, 76 bp, Artificial Sequence
  Description of Artificial Sequence: Synthetic gluten; 5' sequence + inner sequence + 3'  sequence
tagggaagagaaggacatatgatggccgatgctgcactagtctcaagttgtcattgactagtacatgaccacttga

SEQ ID NO: 43832 - DNA, 76 bp, Artificial Sequence; identical to SEQ ID NO: 7616
  Description of Artificial Sequence: Synthetic gluten; 5' sequence + inner sequence + 3'  sequence

SEQ ID NO: 43833 - DNA, 76 bp, Artificial Sequence
  Description of Artificial Sequence: Synthetic gluten; 5' sequence + inner sequence + 3'  sequence
tagggaagagaaggacatatgatggccgaagcttccctattcgtacggcagcattgactagtacatgaccacttga

SEQ ID NO: 43834 - DNA, 76 bp, Artificial Sequence
  Description of Artificial Sequence: Synthetic gluten; 5' sequence + inner sequence + 3'  sequence
tagggaagagaaggacatatgattggccggatctgacctgtccctagttgcgattgactagtacatgaccacttga

SEQ ID NO: 43835 - DNA, 76 bp, Artificial Sequence
  Description of Artificial Sequence: Synthetic gluten; 5' sequence + inner sequence + 3'  sequence
tagggaagagaaggacatatgatgtcatgcgcggacattccagttggcgtggattgactagtacatgaccacttga

SEQ ID NO: 43836 - DNA, 76 bp, Artificial Sequence; identical to SEQ ID NO: 7713
  Description of Artificial Sequence: Synthetic gluten; 5' sequence + inner sequence + 3'  sequence

SEQ ID NO: 43837 - DNA, 76 bp, Artificial Sequence
  Description of Artificial Sequence: Synthetic gluten; 5' sequence + inner sequence + 3'  sequence
tagggaagagaaggacatatgatcgtaccgcaagtgacgtgtccgagccgtgattgactagtacatgaccacttga

SEQ ID NO: 43838 - DNA, 76 bp, Artificial Sequence
  Description of Artificial Sequence: Synthetic gluten; 5' sequence + inner sequence + 3'  sequence
tagggaagagaaggacatatgatccacatgccgtatcggtttgcggactaacattgactagtacatgaccacttga

SEQ ID NO: 43839 - DNA, 76 bp, Artificial Sequence
  Description of Artificial Sequence: Synthetic gluten; 5' sequence + inner sequence + 3'  sequence
tagggaagagaaggacatatgattggcctgctcgacctgtatcaggcactaggttgactagtacatgaccacttga

SEQ ID NO: 43840 - DNA, 76 bp, Artificial Sequence
  Description of Artificial Sequence: Synthetic gluten; 5' sequence + inner sequence + 3'  sequence
tagggaagagaaggacatatgatggactgaacgaccgaattacgcttgtcacattgactagtacatgaccacttga

SEQ ID NO: 43841 - DNA, 76 bp, Artificial Sequence
  Description of Artificial Sequence: Synthetic gluten; 5' sequence + inner sequence + 3'  sequence
tagggaagagaaggacatatgatggactgcgcgtgacctatcaatggcatgcattgactagtacatgaccacttga

SEQ ID NO: 43842 - DNA, 76 bp, Artificial Sequence
  Description of Artificial Sequence: Synthetic gluten; 5' sequence + inner sequence + 3'  sequence
tagggaagagaaggacatatgatgtacgcacgctgagcgccaagtgacatggattgactagtacatgaccacttga

SEQ ID NO: 43843 - DNA, 76 bp, Artificial Sequence
  Description of Artificial Sequence: Synthetic gluten; 5' sequence + inner sequence + 3'  sequence
tagggaagagaaggacatatgatggaacgcacgaagccctgtactaaggcaaattgactagtacatgaccacttga

SEQ ID NO: 43844 - DNA, 76 bp, Artificial Sequence
  Description of Artificial Sequence: Synthetic gluten; 5' sequence + inner sequence + 3'  sequence
tagggaagagaaggacatatgatcgtaccgcaagtgacgagtccgtgccgtgattgactagtacatgaccacttga

SEQ ID NO: 43845 - DNA, 76 bp, Artificial Sequence; identical to SEQ ID NO: 7700
  Description of Artificial Sequence: Synthetic gluten; 5' sequence + inner sequence + 3'  sequence

SEQ ID NO: 43846 - DNA, 76 bp, Artificial Sequence
  Description of Artificial Sequence: Synthetic gluten; 5' sequence + inner sequence + 3'  sequence
tagggaagagaaggacatatgatccgtaccgtcgcaagtgctatcttccgatcttgactagtacatgaccacttga

SEQ ID NO: 43847 - DNA, 76 bp, Artificial Sequence
  Description of Artificial Sequence: Synthetic gluten; 5' sequence + inner sequence + 3'  sequence
tagggaagagaaggacatatgatcgaagcatgtcaagagccgaagacaccatattgactagtacatgaccacttga

SEQ ID NO: 43848 - DNA, 76 bp, Artificial Sequence
  Description of Artificial Sequence: Synthetic gluten; 5' sequence + inner sequence + 3'  sequence
tagggaagagaaggacatatgatgacagcggagcgggagcacaagagtggcatttgactagtacatgaccacttga

SEQ ID NO: 43849 - DNA, 76 bp, Artificial Sequence
  Description of Artificial Sequence: Synthetic gluten; 5' sequence + inner sequence + 3'  sequence
tagggaagagaaggacatatgatggcatgcgatctcactatcaagtgttggcattgactagtacatgaccacttga

SEQ ID NO: 43850 - DNA, 76 bp, Artificial Sequence
  Description of Artificial Sequence: Synthetic gluten; 5' sequence + inner sequence + 3'  sequence
tagggaagagaaggacatatgatggccacgcctgccctaccagtgctcatggattgactagtacatgaccacttga

SEQ ID NO: 43851 - DNA, 76 bp, Artificial Sequence
  Description of Artificial Sequence: Synthetic gluten; 5' sequence + inner sequence + 3'  sequence
tagggaagagaaggacatatgattcagatggcctcatcgtcactatctagtcattgactagtacatgaccacttga

SEQ ID NO: 43852 - DNA, 76 bp, Artificial Sequence; identical to SEQ ID NO: 3164
  Description of Artificial Sequence: Synthetic gluten; 5' sequence + inner sequence + 3'  sequence

SEQ ID NO: 43853 - DNA, 76 bp, Artificial Sequence
  Description of Artificial Sequence: Synthetic gluten; 5' sequence + inner sequence + 3'  sequence
tagggaagagaaggacatatgatcgaacgacctaaacgtcagaataggcagtattgactagtacatgaccacttga

SEQ ID NO: 43854 - DNA, 76 bp, Artificial Sequence
  Description of Artificial Sequence: Synthetic gluten; 5' sequence + inner sequence + 3'  sequence
tagggaagagaaggacatatgattgagatcaccgcaagacaaggggacggcgattgactagtacatgaccacttga

SEQ ID NO: 43855 - DNA, 76 bp, Artificial Sequence
  Description of Artificial Sequence: Synthetic gluten; 5' sequence + inner sequence + 3'  sequence
tagggaagagaaggacatatgatggccgaactcgtccccttaacgtacgtggcttgactagtacatgaccacttga

SEQ ID NO: 43856 - DNA, 76 bp, Artificial Sequence
  Description of Artificial Sequence: Synthetic gluten; 5' sequence + inner sequence + 3'  sequence
tagggaagagaaggacatatgataatatggccgccgaggaagtactatcaatgttgactagtacatgaccacttga

SEQ ID NO: 43857 - DNA, 76 bp, Artificial Sequence
  Description of Artificial Sequence: Synthetic gluten; 5' sequence + inner sequence + 3'  sequence
tagggaagagaaggacatatgattgtccgacacttcacgctgagatcgtactgttgactagtacatgaccacttga

SEQ ID NO: 43858 - DNA, 76 bp, Artificial Sequence
  Description of Artificial Sequence: Synthetic gluten; 5' sequence + inner sequence + 3'  sequence
tagggaagagaaggacatatgataccgtcatgcgaaagtcatatctcggcccgttgactagtacatgaccacttga

SEQ ID NO: 43859 - DNA, 76 bp, Artificial Sequence; identical to SEQ ID NO: 39602
  Description of Artificial Sequence: Synthetic gluten; 5' sequence + inner sequence + 3'  sequence

SEQ ID NO: 43860 - DNA, 76 bp, Artificial Sequence
  Description of Artificial Sequence: Synthetic gluten; 5' sequence + inner sequence + 3'  sequence
tagggaagagaaggacatatgatcgtatggtcgagcgtaccttcaaggagtcattgactagtacatgaccacttga

SEQ ID NO: 43861 - DNA, 76 bp, Artificial Sequence
  Description of Artificial Sequence: Synthetic gluten; 5' sequence + inner sequence + 3'  sequence
tagggaagagaaggacatatgatcatgacgtgtgaagcagccatgctgtcatattgactagtacatgaccacttga

SEQ ID NO: 43862 - DNA, 76 bp, Artificial Sequence
  Description of Artificial Sequence: Synthetic gluten; 5' sequence + inner sequence + 3'  sequence
tagggaagagaaggacatatgatcctgatcaggcatagatgaccggcaacggattgactagtacatgaccacttga

SEQ ID NO: 43863 - DNA, 75 bp, Artificial Sequence
  Description of Artificial Sequence: Synthetic gluten; 5' sequence + inner sequence + 3'  sequence
tagggaagagaaggacatatgatccgtatcgtaccgtacatgtgcgtatcaattgactagtacatgaccacttga

SEQ ID NO: 43864 - DNA, 76 bp, Artificial Sequence
  Description of Artificial Sequence: Synthetic gluten; 5' sequence + inner sequence + 3'  sequence
tagggaagagaaggacatatgatcctgaacggccctacagagcgtacgaagcattgactagtacatgaccacttga

SEQ ID NO: 43865 - DNA, 75 bp, Artificial Sequence
  Description of Artificial Sequence: Synthetic gluten; 5' sequence + inner sequence + 3'  sequence
tagggaagagaaggacatatgattgacctgagctgaacgaagaccgctagtcttgactagtacatgaccacttga

SEQ ID NO: 43866 - DNA, 76 bp, Artificial Sequence
  Description of Artificial Sequence: Synthetic gluten; 5' sequence + inner sequence + 3'  sequence
tagggaagagaaggacatatgatcgtgacaaacaaggatctaccagcttcgccttgactagtacatgaccacttga

SEQ ID NO: 43867 - DNA, 76 bp, Artificial Sequence
  Description of Artificial Sequence: Synthetic gluten; 5' sequence + inner sequence + 3'  sequence
tagggaagagaaggacatatgattgtccagatcgacctacatgtctaggcaatttgactagtacatgaccacttga

SEQ ID NO: 43868 - DNA, 76 bp, Artificial Sequence
  Description of Artificial Sequence: Synthetic gluten; 5' sequence + inner sequence + 3'  sequence
tagggaagagaaggacatatgattggccgactgacctagcagagcatggcatcttgactagtacatgaccacttga

SEQ ID NO: 43869 - DNA, 76 bp, Artificial Sequence; identical to SEQ ID NO: 39927
  Description of Artificial Sequence: Synthetic gluten; 5' sequence + inner sequence + 3'  sequence

SEQ ID NO: 43870 - DNA, 76 bp, Artificial Sequence; identical to SEQ ID NO: 3097
  Description of Artificial Sequence: Synthetic gluten; 5' sequence + inner sequence + 3'  sequence

SEQ ID NO: 43871 - DNA, 76 bp, Artificial Sequence
  Description of Artificial Sequence: Synthetic gluten; 5' sequence + inner sequence + 3'  sequence
tagggaagagaaggacatatgatctgagccgaagatcctgtctttactcatgattgactagtacatgaccacttga

SEQ ID NO: 43872 - DNA, 76 bp, Artificial Sequence; identical to SEQ ID NO: 39514
  Description of Artificial Sequence: Synthetic gluten; 5' sequence + inner sequence + 3'  sequence

SEQ ID NO: 43873 - DNA, 76 bp, Artificial Sequence
  Description of Artificial Sequence: Synthetic gluten; 5' sequence + inner sequence + 3'  sequence
tagggaagagaaggacatatgatggacgacctggatgtgagcatgcatctagtttgactagtacatgaccacttga

SEQ ID NO: 43874 - DNA, 76 bp, Artificial Sequence
  Description of Artificial Sequence: Synthetic gluten; 5' sequence + inner sequence + 3'  sequence
tagggaagagaaggacatatgatttggcatgcgatggaaggtcagctagttcattgactagtacatgaccacttga

SEQ ID NO: 43875 - DNA, 76 bp, Artificial Sequence
  Description of Artificial Sequence: Synthetic gluten; 5' sequence + inner sequence + 3'  sequence
tagggaagagaaggacatatgatttggcctgagctgaactgttaaatgtgtgtttgactagtacatgaccacttga

SEQ ID NO: 43876 - DNA, 76 bp, Artificial Sequence
  Description of Artificial Sequence: Synthetic gluten; 5' sequence + inner sequence + 3'  sequence
tagggaagagaaggacatatgatcgcatagggccgagacagctacgactagtgttgactagtacatgaccacttga

SEQ ID NO: 43877 - DNA, 76 bp, Artificial Sequence; identical to SEQ ID NO: 7798
  Description of Artificial Sequence: Synthetic gluten; 5' sequence + inner sequence + 3'  sequence

SEQ ID NO: 43878 - DNA, 76 bp, Artificial Sequence
  Description of Artificial Sequence: Synthetic gluten; 5' sequence + inner sequence + 3'  sequence
tagggaagagaaggacatatgatccgacgatgaactatgtacttagtgtctgattgactagtacatgaccacttga

SEQ ID NO: 43879 - DNA, 76 bp, Artificial Sequence
  Description of Artificial Sequence: Synthetic gluten; 5' sequence + inner sequence + 3'  sequence
tagggaagagaaggacatatgatcacatcaaataggcctgagcgtatggactattgactagtacatgaccacttga

SEQ ID NO: 43880 - DNA, 76 bp, Artificial Sequence
  Description of Artificial Sequence: Synthetic gluten; 5' sequence + inner sequence + 3'  sequence
tagggaagagaaggacatatgatgacgactcgaaccaaggaaatggactgggcttgactagtacatgaccacttga

SEQ ID NO: 43881 - DNA, 76 bp, Artificial Sequence
  Description of Artificial Sequence: Synthetic gluten; 5' sequence + inner sequence + 3'  sequence
tagggaagagaaggacatatgatgctccagatcgcaccttcaagttcggcatgttgactagtacatgaccacttga

SEQ ID NO: 43882 - DNA, 76 bp, Artificial Sequence
  Description of Artificial Sequence: Synthetic gluten; 5' sequence + inner sequence + 3'  sequence
tagggaagagaaggacatatgattggcctgagcgaccacatgtctgtcaatcgttgactagtacatgaccacttga

SEQ ID NO: 43883 - DNA, 76 bp, Artificial Sequence
  Description of Artificial Sequence: Synthetic gluten; 5' sequence + inner sequence + 3'  sequence
tagggaagagaaggacatatgatcgtaacgtcggtaaccttgaagcggtaagtttgactagtacatgaccacttga

SEQ ID NO: 43884 - DNA, 76 bp, Artificial Sequence; identical to SEQ ID NO: 3635
  Description of Artificial Sequence: Synthetic gluten; 5' sequence + inner sequence + 3'  sequence

SEQ ID NO: 43885 - DNA, 76 bp, Artificial Sequence
  Description of Artificial Sequence: Synthetic gluten; 5' sequence + inner sequence + 3'  sequence
tagggaagagaaggacatatgattcgtaccgtcaaagtgcttggatcttcaggttgactagtacatgaccacttga

SEQ ID NO: 43886 - DNA, 76 bp, Artificial Sequence
  Description of Artificial Sequence: Synthetic gluten; 5' sequence + inner sequence + 3'  sequence
tagggaagagaaggacatatgattggactgctattcacggcgagaatgtcaatttgactagtacatgaccacttga

SEQ ID NO: 43887 - DNA, 75 bp, Artificial Sequence
  Description of Artificial Sequence: Synthetic gluten; 5' sequence + inner sequence + 3'  sequence
tagggaagagaaggacatatgatggcatgcgatggatgtggatggccagtctttgactagtacatgaccacttga

SEQ ID NO: 43888 - DNA, 76 bp, Artificial Sequence; identical to SEQ ID NO: 7722
  Description of Artificial Sequence: Synthetic gluten; 5' sequence + inner sequence + 3'  sequence

SEQ ID NO: 43889 - DNA, 76 bp, Artificial Sequence
  Description of Artificial Sequence: Synthetic gluten; 5' sequence + inner sequence + 3'  sequence
tagggaagagaaggacatatgatccgaatcgacctcaagaacactgctcgacgttgactagtacatgaccacttga

SEQ ID NO: 43890 - DNA, 76 bp, Artificial Sequence
  Description of Artificial Sequence: Synthetic gluten; 5' sequence + inner sequence + 3'  sequence
tagggaagagaaggacatatgattggccgaagcttccctagagacggacgtatttgactagtacatgaccacttga

SEQ ID NO: 43891 - DNA, 76 bp, Artificial Sequence
  Description of Artificial Sequence: Synthetic gluten; 5' sequence + inner sequence + 3'  sequence
tagggaagagaaggacatatgatcgaccgacaaacactaattggcatcggggtttgactagtacatgaccacttga

SEQ ID NO: 43892 - DNA, 76 bp, Artificial Sequence
  Description of Artificial Sequence: Synthetic gluten; 5' sequence + inner sequence + 3'  sequence
tagggaagagaaggacatatgatatgcctgcgatgaccgtggcatgcactatattgactagtacatgaccacttga

SEQ ID NO: 43893 - DNA, 76 bp, Artificial Sequence
  Description of Artificial Sequence: Synthetic gluten; 5' sequence + inner sequence + 3'  sequence
tagggaagagaaggacatatgattgagcaacgcgaagaatagggctgttcgaattgactagtacatgaccacttga

SEQ ID NO: 43894 - DNA, 76 bp, Artificial Sequence
  Description of Artificial Sequence: Synthetic gluten; 5' sequence + inner sequence + 3'  sequence
tagggaagagaaggacatatgatgtacgtcgacagacctcaagttggcgtgtattgactagtacatgaccacttga

SEQ ID NO: 43895 - DNA, 76 bp, Artificial Sequence
  Description of Artificial Sequence: Synthetic gluten; 5' sequence + inner sequence + 3'  sequence
tagggaagagaaggacatatgattgtcatgcgatgaactggcgtggtccttgcttgactagtacatgaccacttga

SEQ ID NO: 43896 - DNA, 76 bp, Artificial Sequence
  Description of Artificial Sequence: Synthetic gluten; 5' sequence + inner sequence + 3'  sequence
tagggaagagaaggacatatgatcctgctcgaccgtcaagtgaaatggcgctgttgactagtacatgaccacttga

SEQ ID NO: 43897 - DNA, 75 bp, Artificial Sequence
  Description of Artificial Sequence: Synthetic gluten; 5' sequence + inner sequence + 3'  sequence
tagggaagagaaggacatatgatctatcacatggcctgcctacttactgtcattgactagtacatgaccacttga

SEQ ID NO: 43898 - DNA, 76 bp, Artificial Sequence
  Description of Artificial Sequence: Synthetic gluten; 5' sequence + inner sequence + 3'  sequence
tagggaagagaaggacatatgatcatccccaacgatcggcatatggcattcgattgactagtacatgaccacttga

SEQ ID NO: 43899 - DNA, 76 bp, Artificial Sequence; identical to SEQ ID NO: 31272
  Description of Artificial Sequence: Synthetic gluten; 5' sequence + inner sequence + 3'  sequence

SEQ ID NO: 43900 - DNA, 76 bp, Artificial Sequence
  Description of Artificial Sequence: Synthetic gluten; 5' sequence + inner sequence + 3'  sequence
tagggaagagaaggacatatgatacattgccgcaatgggaatatgaactgcgcttgactagtacatgaccacttga

SEQ ID NO: 43901 - DNA, 76 bp, Artificial Sequence
  Description of Artificial Sequence: Synthetic gluten; 5' sequence + inner sequence + 3'  sequence
tagggaagagaaggacatatgatagcaactcactacaagatcatttccgccggttgactagtacatgaccacttga

SEQ ID NO: 43902 - DNA, 76 bp, Artificial Sequence
  Description of Artificial Sequence: Synthetic gluten; 5' sequence + inner sequence + 3'  sequence
tagggaagagaaggacatatgatcgatgaggcgaagcaatctgacggggtcaattgactagtacatgaccacttga

SEQ ID NO: 43903 - DNA, 76 bp, Artificial Sequence
  Description of Artificial Sequence: Synthetic gluten; 5' sequence + inner sequence + 3'  sequence
tagggaagagaaggacatatgatggcctgatcgaacctagagagtggcggggattgactagtacatgaccacttga

SEQ ID NO: 43904 - DNA, 76 bp, Artificial Sequence
  Description of Artificial Sequence: Synthetic gluten; 5' sequence + inner sequence + 3'  sequence
tagggaagagaaggacatatgatcagatggccgaagctgcactacatgtggacttgactagtacatgaccacttga

SEQ ID NO: 43905 - DNA, 76 bp, Artificial Sequence
  Description of Artificial Sequence: Synthetic gluten; 5' sequence + inner sequence + 3'  sequence
tagggaagagaaggacatatgatcgacctgggtgaaccgaagatgctgtcacattgactagtacatgaccacttga

SEQ ID NO: 43906 - DNA, 76 bp, Artificial Sequence
  Description of Artificial Sequence: Synthetic gluten; 5' sequence + inner sequence + 3'  sequence
tagggaagagaaggacatatgatggcctgcgctggaatgtgcgaatgtacgcattgactagtacatgaccacttga

SEQ ID NO: 43907 - DNA, 72 bp, Artificial Sequence
  Description of Artificial Sequence: Synthetic gluten; 5' sequence + inner sequence + 3'  sequence
tagggaagagaaggacatatgatggcattcgatgcactacaagtcgtcattgactagtacatgaccacttga

SEQ ID NO: 43908 - DNA, 76 bp, Artificial Sequence
  Description of Artificial Sequence: Synthetic gluten; 5' sequence + inner sequence + 3'  sequence
tagggaagagaaggacatatgatggcctgatcgaacctagagtgtggcgtggattgactagtacatgaccacttga

SEQ ID NO: 43909 - DNA, 76 bp, Artificial Sequence
  Description of Artificial Sequence: Synthetic gluten; 5' sequence + inner sequence + 3'  sequence
tagggaagagaaggacatatgatggcatgacgcattccctaaagtggcaggtattgactagtacatgaccacttga

SEQ ID NO: 43910 - DNA, 76 bp, Artificial Sequence
  Description of Artificial Sequence: Synthetic gluten; 5' sequence + inner sequence + 3'  sequence
tagggaagagaaggacatatgatggcctgatcgaacctagagagtggtgtggattgactagtacatgaccacttga

SEQ ID NO: 43911 - DNA, 76 bp, Artificial Sequence
  Description of Artificial Sequence: Synthetic gluten; 5' sequence + inner sequence + 3'  sequence
tagggaagagaaggacatatgatggccgacgatggatgtggatgtattggtctttgactagtacatgaccacttga

SEQ ID NO: 43912 - DNA, 76 bp, Artificial Sequence; identical to SEQ ID NO: 39504
  Description of Artificial Sequence: Synthetic gluten; 5' sequence + inner sequence + 3'  sequence

SEQ ID NO: 43913 - DNA, 76 bp, Artificial Sequence
  Description of Artificial Sequence: Synthetic gluten; 5' sequence + inner sequence + 3'  sequence
tagggaagagaaggacatatgatgccagcagaggacttcaaggtgagtacatattgactagtacatgaccacttga

SEQ ID NO: 43914 - DNA, 76 bp, Artificial Sequence
  Description of Artificial Sequence: Synthetic gluten; 5' sequence + inner sequence + 3'  sequence
tagggaagagaaggacatatgatagaactcgtgtacgtggagagagatccggattgactagtacatgaccacttga

SEQ ID NO: 43915 - DNA, 76 bp, Artificial Sequence
  Description of Artificial Sequence: Synthetic gluten; 5' sequence + inner sequence + 3'  sequence
tagggaagagaaggacatatgatacgcaccacgatgaggatccgctcttcacgttgactagtacatgaccacttga

SEQ ID NO: 43916 - DNA, 76 bp, Artificial Sequence
  Description of Artificial Sequence: Synthetic gluten; 5' sequence + inner sequence + 3'  sequence
tagggaagagaaggacatatgatggcatgcgctgggtagtgatcacgtacgggttgactagtacatgaccacttga

SEQ ID NO: 43917 - DNA, 76 bp, Artificial Sequence
  Description of Artificial Sequence: Synthetic gluten; 5' sequence + inner sequence + 3'  sequence
tagggaagagaaggacatatgatgtcatgatcggatgtggatgtggactcgacttgactagtacatgaccacttga

SEQ ID NO: 43918 - DNA, 76 bp, Artificial Sequence; identical to SEQ ID NO: 7688
  Description of Artificial Sequence: Synthetic gluten; 5' sequence + inner sequence + 3'  sequence

SEQ ID NO: 43919 - DNA, 76 bp, Artificial Sequence
  Description of Artificial Sequence: Synthetic gluten; 5' sequence + inner sequence + 3'  sequence
tagggaagagaaggacatatgatgtacgacgcggaccttcaagtaggcgcgtattgactagtacatgaccacttga

SEQ ID NO: 43920 - DNA, 76 bp, Artificial Sequence
  Description of Artificial Sequence: Synthetic gluten; 5' sequence + inner sequence + 3'  sequence
tagggaagagaaggacatatgatggcattcgatgcactacaagttgttgtgcattgactagtacatgaccacttga

SEQ ID NO: 43921 - DNA, 76 bp, Artificial Sequence; identical to SEQ ID NO: 7710
  Description of Artificial Sequence: Synthetic gluten; 5' sequence + inner sequence + 3'  sequence

SEQ ID NO: 43922 - DNA, 76 bp, Artificial Sequence
  Description of Artificial Sequence: Synthetic gluten; 5' sequence + inner sequence + 3'  sequence
tagggaagagaaggacatatgatccaatcgaccgcgtggacttgcactgggccttgactagtacatgaccacttga

SEQ ID NO: 43923 - DNA, 76 bp, Artificial Sequence
  Description of Artificial Sequence: Synthetic gluten; 5' sequence + inner sequence + 3'  sequence
tagggaagagaaggacatatgatggcatgacgcgaccccttcaagctgtgtcattgactagtacatgaccacttga

SEQ ID NO: 43924 - DNA, 76 bp, Artificial Sequence
  Description of Artificial Sequence: Synthetic gluten; 5' sequence + inner sequence + 3'  sequence
tagggaagagaaggacatatgattccatcacaggtccggagaacggctacgacttgactagtacatgaccacttga

SEQ ID NO: 43925 - DNA, 76 bp, Artificial Sequence
  Description of Artificial Sequence: Synthetic gluten; 5' sequence + inner sequence + 3'  sequence
tagggaagagaaggacatatgatcgacagagcgaatggcaatctccagtcacattgactagtacatgaccacttga

SEQ ID NO: 43926 - DNA, 76 bp, Artificial Sequence
  Description of Artificial Sequence: Synthetic gluten; 5' sequence + inner sequence + 3'  sequence
tagggaagagaaggacatatgattaatccaagatgcagcagatggacgacctcttgactagtacatgaccacttga

SEQ ID NO: 43927 - DNA, 76 bp, Artificial Sequence
  Description of Artificial Sequence: Synthetic gluten; 5' sequence + inner sequence + 3'  sequence
tagggaagagaaggacatatgatggccgatcgtacctggtgatgtgcgtatccttgactagtacatgaccacttga

SEQ ID NO: 43928 - DNA, 76 bp, Artificial Sequence; identical to SEQ ID NO: 3972
  Description of Artificial Sequence: Synthetic gluten; 5' sequence + inner sequence + 3'  sequence

SEQ ID NO: 43929 - DNA, 76 bp, Artificial Sequence
  Description of Artificial Sequence: Synthetic gluten; 5' sequence + inner sequence + 3'  sequence
tagggaagagaaggacatatgatacgatctggacacagctgacaggaacgcaattgactagtacatgaccacttga

SEQ ID NO: 43930 - DNA, 76 bp, Artificial Sequence
  Description of Artificial Sequence: Synthetic gluten; 5' sequence + inner sequence + 3'  sequence
tagggaagagaaggacatatgatggccgtgggagaaactagcgctacgtacgattgactagtacatgaccacttga

SEQ ID NO: 43931 - DNA, 76 bp, Artificial Sequence
  Description of Artificial Sequence: Synthetic gluten; 5' sequence + inner sequence + 3'  sequence
tagggaagagaaggacatatgatacttcgcgaccctagcatgctacgtacgttttgactagtacatgaccacttga

SEQ ID NO: 43932 - DNA, 76 bp, Artificial Sequence
  Description of Artificial Sequence: Synthetic gluten; 5' sequence + inner sequence + 3'  sequence
tagggaagagaaggacatatgattggcctgagcgaaactagtactagccatgcttgactagtacatgaccacttga

SEQ ID NO: 43933 - DNA, 76 bp, Artificial Sequence
  Description of Artificial Sequence: Synthetic gluten; 5' sequence + inner sequence + 3'  sequence
tagggaagagaaggacatatgatcccatcagatggcctaatctgagtcaggcattgactagtacatgaccacttga

SEQ ID NO: 43934 - DNA, 76 bp, Artificial Sequence
  Description of Artificial Sequence: Synthetic gluten; 5' sequence + inner sequence + 3'  sequence
tagggaagagaaggacatatgatggcccgactccctatcagtggcacgtactattgactagtacatgaccacttga

SEQ ID NO: 43935 - DNA, 76 bp, Artificial Sequence
  Description of Artificial Sequence: Synthetic gluten; 5' sequence + inner sequence + 3'  sequence
tagggaagagaaggacatatgatcgaaccagagagcagttctaggcaatctcattgactagtacatgaccacttga

SEQ ID NO: 43936 - DNA, 76 bp, Artificial Sequence
  Description of Artificial Sequence: Synthetic gluten; 5' sequence + inner sequence + 3'  sequence
tagggaagagaaggacatatgatggcatgctctgaccgaacgtgctaatggctttgactagtacatgaccacttga

SEQ ID NO: 43937 - DNA, 76 bp, Artificial Sequence
  Description of Artificial Sequence: Synthetic gluten; 5' sequence + inner sequence + 3'  sequence
tagggaagagaaggacatatgatcatggcgaagggggcagtcacctgctcatattgactagtacatgaccacttga

SEQ ID NO: 43938 - DNA, 76 bp, Artificial Sequence
  Description of Artificial Sequence: Synthetic gluten; 5' sequence + inner sequence + 3'  sequence
tagggaagagaaggacatatgatggcccgaatcccttcaagatgggcgatggattgactagtacatgaccacttga

SEQ ID NO: 43939 - DNA, 76 bp, Artificial Sequence
  Description of Artificial Sequence: Synthetic gluten; 5' sequence + inner sequence + 3'  sequence
tagggaagagaaggacatatgatacttctcggaacggcatgtgaatcgtcgaattgactagtacatgaccacttga

SEQ ID NO: 43940 - DNA, 76 bp, Artificial Sequence
  Description of Artificial Sequence: Synthetic gluten; 5' sequence + inner sequence + 3'  sequence
tagggaagagaaggacatatgatcctcatacggccgactctgagtgcaagttattgactagtacatgaccacttga

SEQ ID NO: 43941 - DNA, 76 bp, Artificial Sequence
  Description of Artificial Sequence: Synthetic gluten; 5' sequence + inner sequence + 3'  sequence
tagggaagagaaggacatatgattcacagcatggtggatttgcaaaccctcaattgactagtacatgaccacttga

SEQ ID NO: 43942 - DNA, 76 bp, Artificial Sequence
  Description of Artificial Sequence: Synthetic gluten; 5' sequence + inner sequence + 3'  sequence
tagggaagagaaggacatatgattgcaacgcggcttgcttcctactaccgtccttgactagtacatgaccacttga

SEQ ID NO: 43943 - DNA, 76 bp, Artificial Sequence
  Description of Artificial Sequence: Synthetic gluten; 5' sequence + inner sequence + 3'  sequence
tagggaagagaaggacatatgatggcctgcgatgaccgtcaagctaacttgcgttgactagtacatgaccacttga

SEQ ID NO: 43944 - DNA, 76 bp, Artificial Sequence
  Description of Artificial Sequence: Synthetic gluten; 5' sequence + inner sequence + 3'  sequence
tagggaagagaaggacatatgatccgattgacataccgaccggatcagcatgattgactagtacatgaccacttga

SEQ ID NO: 43945 - DNA, 76 bp, Artificial Sequence
  Description of Artificial Sequence: Synthetic gluten; 5' sequence + inner sequence + 3'  sequence
tagggaagagaaggacatatgattgactgaacgaaccgtccatgaacgtaggtttgactagtacatgaccacttga

SEQ ID NO: 43946 - DNA, 76 bp, Artificial Sequence
  Description of Artificial Sequence: Synthetic gluten; 5' sequence + inner sequence + 3'  sequence
tagggaagagaaggacatatgatgctccgacgatggaaggacgtggcagtcaattgactagtacatgaccacttga

SEQ ID NO: 43947 - DNA, 76 bp, Artificial Sequence
  Description of Artificial Sequence: Synthetic gluten; 5' sequence + inner sequence + 3'  sequence
tagggaagagaaggacatatgatacatggcctgaacgaaatcgacggcacttgttgactagtacatgaccacttga

SEQ ID NO: 43948 - DNA, 76 bp, Artificial Sequence
  Description of Artificial Sequence: Synthetic gluten; 5' sequence + inner sequence + 3'  sequence
tagggaagagaaggacatatgatgatgagccgaagagagggaaatagggactattgactagtacatgaccacttga

SEQ ID NO: 43949 - DNA, 76 bp, Artificial Sequence
  Description of Artificial Sequence: Synthetic gluten; 5' sequence + inner sequence + 3'  sequence
tagggaagagaaggacatatgatcgtcctgagctgaccgtctgtctctggcatttgactagtacatgaccacttga

SEQ ID NO: 43950 - DNA, 76 bp, Artificial Sequence
  Description of Artificial Sequence: Synthetic gluten; 5' sequence + inner sequence + 3'  sequence
tagggaagagaaggacatatgatgaactgaacgcaccgttttctaggcaagcattgactagtacatgaccacttga

SEQ ID NO: 43951 - DNA, 76 bp, Artificial Sequence; identical to SEQ ID NO: 7925
  Description of Artificial Sequence: Synthetic gluten; 5' sequence + inner sequence + 3'  sequence

SEQ ID NO: 43952 - DNA, 76 bp, Artificial Sequence
  Description of Artificial Sequence: Synthetic gluten; 5' sequence + inner sequence + 3'  sequence
tagggaagagaaggacatatgatggcctgatcgaacctagagagcggcgtgggttgactagtacatgaccacttga

SEQ ID NO: 43953 - DNA, 76 bp, Artificial Sequence
  Description of Artificial Sequence: Synthetic gluten; 5' sequence + inner sequence + 3'  sequence
tagggaagagaaggacatatgatcgcaagccgtagtaaatcataccgagaggcttgactagtacatgaccacttga

SEQ ID NO: 43954 - DNA, 76 bp, Artificial Sequence
  Description of Artificial Sequence: Synthetic gluten; 5' sequence + inner sequence + 3'  sequence
tagggaagagaaggacatatgatggcctgcgatggaatgagcgaatgtacgcattgactagtacatgaccacttga

SEQ ID NO: 43955 - DNA, 76 bp, Artificial Sequence
  Description of Artificial Sequence: Synthetic gluten; 5' sequence + inner sequence + 3'  sequence
tagggaagagaaggacatatgatcatgtggccgactgaactagcaagctggtcttgactagtacatgaccacttga

SEQ ID NO: 43956 - DNA, 76 bp, Artificial Sequence
  Description of Artificial Sequence: Synthetic gluten; 5' sequence + inner sequence + 3'  sequence
tagggaagagaaggacatatgatcgaaccgctgtatgctcaacgtatggtggtttgactagtacatgaccacttga

SEQ ID NO: 43957 - DNA, 76 bp, Artificial Sequence
  Description of Artificial Sequence: Synthetic gluten; 5' sequence + inner sequence + 3'  sequence
tagggaagagaaggacatatgatggcattcgatgcactacacgttgttgtgtattgactagtacatgaccacttga

SEQ ID NO: 43958 - DNA, 76 bp, Artificial Sequence
  Description of Artificial Sequence: Synthetic gluten; 5' sequence + inner sequence + 3'  sequence
tagggaagagaaggacatatgattacgcaacgaccctatcgagaggacatgtattgactagtacatgaccacttga

SEQ ID NO: 43959 - DNA, 76 bp, Artificial Sequence
  Description of Artificial Sequence: Synthetic gluten; 5' sequence + inner sequence + 3'  sequence
tagggaagagaaggacatatgatgcttgagccgaagaccctacaatcagatgattgactagtacatgaccacttga

SEQ ID NO: 43960 - DNA, 75 bp, Artificial Sequence
  Description of Artificial Sequence: Synthetic gluten; 5' sequence + inner sequence + 3'  sequence
tagggaagagaaggacatatgattggacggaagaaagctactactggcagcattgactagtacatgaccacttga

SEQ ID NO: 43961 - DNA, 76 bp, Artificial Sequence
  Description of Artificial Sequence: Synthetic gluten; 5' sequence + inner sequence + 3'  sequence
tagggaagagaaggacatatgatcatgactacacttgctcccaaagaggcatattgactagtacatgaccacttga

SEQ ID NO: 43962 - DNA, 74 bp, Artificial Sequence
  Description of Artificial Sequence: Synthetic gluten; 5' sequence + inner sequence + 3'  sequence
tagggaagagaaggacatatgatgtacggaacgaacgtaatggacgacgtattgactagtacatgaccacttga

SEQ ID NO: 43963 - DNA, 76 bp, Artificial Sequence; identical to SEQ ID NO: 3789
  Description of Artificial Sequence: Synthetic gluten; 5' sequence + inner sequence + 3'  sequence

SEQ ID NO: 43964 - DNA, 76 bp, Artificial Sequence
  Description of Artificial Sequence: Synthetic gluten; 5' sequence + inner sequence + 3'  sequence
tagggaagagaaggacatatgatcgactcgacccgaaagtaggcatgtggctattgactagtacatgaccacttga

SEQ ID NO: 43965 - DNA, 76 bp, Artificial Sequence
  Description of Artificial Sequence: Synthetic gluten; 5' sequence + inner sequence + 3'  sequence
tagggaagagaaggacatatgatggccgacgaggctgaaagtcatacgtgctattgactagtacatgaccacttga

SEQ ID NO: 43966 - DNA, 76 bp, Artificial Sequence
  Description of Artificial Sequence: Synthetic gluten; 5' sequence + inner sequence + 3'  sequence
tagggaagagaaggacatatgatgcgtcagcggcagagggactgatcaggtcattgactagtacatgaccacttga

SEQ ID NO: 43967 - DNA, 76 bp, Artificial Sequence
  Description of Artificial Sequence: Synthetic gluten; 5' sequence + inner sequence + 3'  sequence
tagggaagagaaggacatatgatatggcatgcgatgaccacgtactgggcaatttgactagtacatgaccacttga

SEQ ID NO: 43968 - DNA, 74 bp, Artificial Sequence; identical to SEQ ID NO: 3148
  Description of Artificial Sequence: Synthetic gluten; 5' sequence + inner sequence + 3'  sequence

SEQ ID NO: 43969 - DNA, 76 bp, Artificial Sequence
  Description of Artificial Sequence: Synthetic gluten; 5' sequence + inner sequence + 3'  sequence
tagggaagagaaggacatatgatcgagctcgccgagagccgaagacagtcacattgactagtacatgaccacttga

SEQ ID NO: 43970 - DNA, 76 bp, Artificial Sequence
  Description of Artificial Sequence: Synthetic gluten; 5' sequence + inner sequence + 3'  sequence
tagggaagagaaggacatatgatccgatcgacctacaaagagcctgtaatagcttgactagtacatgaccacttga

SEQ ID NO: 43971 - DNA, 76 bp, Artificial Sequence
  Description of Artificial Sequence: Synthetic gluten; 5' sequence + inner sequence + 3'  sequence
tagggaagagaaggacatatgatccgatcgagcctaatagtagagcatgttacttgactagtacatgaccacttga

SEQ ID NO: 43972 - DNA, 76 bp, Artificial Sequence; identical to SEQ ID NO: 3493
  Description of Artificial Sequence: Synthetic gluten; 5' sequence + inner sequence + 3'  sequence

SEQ ID NO: 43973 - DNA, 76 bp, Artificial Sequence
  Description of Artificial Sequence: Synthetic gluten; 5' sequence + inner sequence + 3'  sequence
tagggaagagaaggacatatgatcctgagccgaagatcacctgtcaagttagattgactagtacatgaccacttga

SEQ ID NO: 43974 - DNA, 76 bp, Artificial Sequence
  Description of Artificial Sequence: Synthetic gluten; 5' sequence + inner sequence + 3'  sequence
tagggaagagaaggacatatgatcatcatgtggccgaacagactagctgggcattgactagtacatgaccacttga

SEQ ID NO: 43975 - DNA, 76 bp, Artificial Sequence
  Description of Artificial Sequence: Synthetic gluten; 5' sequence + inner sequence + 3'  sequence
tagggaagagaaggacatatgatggccgaatctgaccgctatcatgggatggcttgactagtacatgaccacttga

SEQ ID NO: 43976 - DNA, 76 bp, Artificial Sequence
  Description of Artificial Sequence: Synthetic gluten; 5' sequence + inner sequence + 3'  sequence
tagggaagagaaggacatatgatcaacacacgaaggctagctattgactcacgttgactagtacatgaccacttga

SEQ ID NO: 43977 - DNA, 76 bp, Artificial Sequence
  Description of Artificial Sequence: Synthetic gluten; 5' sequence + inner sequence + 3'  sequence
tagggaagagaaggacatatgatgtacgacgcggaccttcaagtaggcgtgcattgactagtacatgaccacttga

SEQ ID NO: 43978 - DNA, 76 bp, Artificial Sequence; identical to SEQ ID NO: 23744
  Description of Artificial Sequence: Synthetic gluten; 5' sequence + inner sequence + 3'  sequence

SEQ ID NO: 43979 - DNA, 76 bp, Artificial Sequence
  Description of Artificial Sequence: Synthetic gluten; 5' sequence + inner sequence + 3'  sequence
tagggaagagaaggacatatgatccactcacatggacgtatctgagctatcgattgactagtacatgaccacttga

SEQ ID NO: 43980 - DNA, 76 bp, Artificial Sequence
  Description of Artificial Sequence: Synthetic gluten; 5' sequence + inner sequence + 3'  sequence
tagggaagagaaggacatatgatggtctgatcgaacctagagagtggcgtggattgactagtacatgaccacttga

SEQ ID NO: 43981 - DNA, 76 bp, Artificial Sequence; identical to SEQ ID NO: 3991
  Description of Artificial Sequence: Synthetic gluten; 5' sequence + inner sequence + 3'  sequence

SEQ ID NO: 43982 - DNA, 76 bp, Artificial Sequence
  Description of Artificial Sequence: Synthetic gluten; 5' sequence + inner sequence + 3'  sequence
tagggaagagaaggacatatgatcacctctgacctgagcatgtgcgctgacgattgactagtacatgaccacttga

SEQ ID NO: 43983 - DNA, 76 bp, Artificial Sequence
  Description of Artificial Sequence: Synthetic gluten; 5' sequence + inner sequence + 3'  sequence
tagggaagagaaggacatatgatggaacggagcggaactcattggatcttcgattgactagtacatgaccacttga

SEQ ID NO: 43984 - DNA, 76 bp, Artificial Sequence
  Description of Artificial Sequence: Synthetic gluten; 5' sequence + inner sequence + 3'  sequence
tagggaagagaaggacatatgatggccgccctggatgtgagcatgcatctagtttgactagtacatgaccacttga

SEQ ID NO: 43985 - DNA, 76 bp, Artificial Sequence
  Description of Artificial Sequence: Synthetic gluten; 5' sequence + inner sequence + 3'  sequence
tagggaagagaaggacatatgatacttcgatgcacctgtctatgtcgactagtttgactagtacatgaccacttga

SEQ ID NO: 43986 - DNA, 76 bp, Artificial Sequence; identical to SEQ ID NO: 3044
  Description of Artificial Sequence: Synthetic gluten; 5' sequence + inner sequence + 3'  sequence

SEQ ID NO: 43987 - DNA, 76 bp, Artificial Sequence
  Description of Artificial Sequence: Synthetic gluten; 5' sequence + inner sequence + 3'  sequence
tagggaagagaaggacatatgatccgagcgacactaagctcatgataggcattttgactagtacatgaccacttga

SEQ ID NO: 43988 - DNA, 76 bp, Artificial Sequence
  Description of Artificial Sequence: Synthetic gluten; 5' sequence + inner sequence + 3'  sequence
tagggaagagaaggacatatgatcctgaacgcaccctaactaagaaacatggattgactagtacatgaccacttga

SEQ ID NO: 43989 - DNA, 76 bp, Artificial Sequence
  Description of Artificial Sequence: Synthetic gluten; 5' sequence + inner sequence + 3'  sequence
tagggaagagaaggacatatgatggtgctggcgaacgaccagacattgtgctattgactagtacatgaccacttga

SEQ ID NO: 43990 - DNA, 76 bp, Artificial Sequence
  Description of Artificial Sequence: Synthetic gluten; 5' sequence + inner sequence + 3'  sequence
tagggaagagaaggacatatgatcatgtacgcgatccccagcattaaggcatattgactagtacatgaccacttga

SEQ ID NO: 43991 - DNA, 76 bp, Artificial Sequence
  Description of Artificial Sequence: Synthetic gluten; 5' sequence + inner sequence + 3'  sequence
tagggaagagaaggacatatgattggactgagcttcactaaaggtgggacgtattgactagtacatgaccacttga

SEQ ID NO: 43992 - DNA, 76 bp, Artificial Sequence
  Description of Artificial Sequence: Synthetic gluten; 5' sequence + inner sequence + 3'  sequence
tagggaagagaaggacatatgattgtccgactcgaccatctggacaggcatacttgactagtacatgaccacttga

SEQ ID NO: 43993 - DNA, 76 bp, Artificial Sequence
  Description of Artificial Sequence: Synthetic gluten; 5' sequence + inner sequence + 3'  sequence
tagggaagagaaggacatatgatgacgaactcgaaccgaagcaaggccggtcattgactagtacatgaccacttga

SEQ ID NO: 43994 - DNA, 76 bp, Artificial Sequence
  Description of Artificial Sequence: Synthetic gluten; 5' sequence + inner sequence + 3'  sequence
tagggaagagaaggacatatgattgcctgatcgaacctagagagtggcgtggattgactagtacatgaccacttga

SEQ ID NO: 43995 - DNA, 76 bp, Artificial Sequence
  Description of Artificial Sequence: Synthetic gluten; 5' sequence + inner sequence + 3'  sequence
tagggaagagaaggacatatgattcgtaccgatcataggccggctagttcatattgactagtacatgaccacttga

SEQ ID NO: 43996 - DNA, 76 bp, Artificial Sequence
  Description of Artificial Sequence: Synthetic gluten; 5' sequence + inner sequence + 3'  sequence
tagggaagagaaggacatatgatccgacgagtccctacaagctgcgtgtcatattgactagtacatgaccacttga

SEQ ID NO: 43997 - DNA, 76 bp, Artificial Sequence
  Description of Artificial Sequence: Synthetic gluten; 5' sequence + inner sequence + 3'  sequence
tagggaagagaaggacatatgatccgatagaccagctactaactagcagcagattgactagtacatgaccacttga

SEQ ID NO: 43998 - DNA, 76 bp, Artificial Sequence
  Description of Artificial Sequence: Synthetic gluten; 5' sequence + inner sequence + 3'  sequence
tagggaagagaaggacatatgatcgcgcgaggttcctaacatcattcgcgagtttgactagtacatgaccacttga

SEQ ID NO: 43999 - DNA, 76 bp, Artificial Sequence
  Description of Artificial Sequence: Synthetic gluten; 5' sequence + inner sequence + 3'  sequence
tagggaagagaaggacatatgatggcattcgatgaccgaccgtacgagagtcattgactagtacatgaccacttga

SEQ ID NO: 44000 - DNA, 76 bp, Artificial Sequence; identical to SEQ ID NO: 39966
  Description of Artificial Sequence: Synthetic gluten; 5' sequence + inner sequence + 3'  sequence

SEQ ID NO: 44001 - DNA, 76 bp, Artificial Sequence
  Description of Artificial Sequence: Synthetic gluten; 5' sequence + inner sequence + 3'  sequence
tagggaagagaaggacatatgatgtccgacatgcccctcaatgtggacgtggattgactagtacatgaccacttga

SEQ ID NO: 44002 - DNA, 76 bp, Artificial Sequence
  Description of Artificial Sequence: Synthetic gluten; 5' sequence + inner sequence + 3'  sequence
tagggaagagaaggacatatgatcatgactcaccgggaacggccagtttcatattgactagtacatgaccacttga

SEQ ID NO: 44003 - DNA, 30 bp, Artificial Sequence; identical to SEQ ID NO: 4
  Description of Artificial Sequence: Synthetic whey; inner sequence

SEQ ID NO: 44004 - DNA, 30 bp, Artificial Sequence; identical to SEQ ID NO: 21
  Description of Artificial Sequence: Synthetic whey; inner sequence

SEQ ID NO: 44005 - DNA, 30 bp, Artificial Sequence; identical to SEQ ID NO: 9
  Description of Artificial Sequence: Synthetic whey; inner sequence

SEQ ID NO: 44006 - DNA, 30 bp, Artificial Sequence; identical to SEQ ID NO: 8
  Description of Artificial Sequence: Synthetic whey; inner sequence

SEQ ID NO: 44007 - DNA, 30 bp, Artificial Sequence; identical to SEQ ID NO: 6
  Description of Artificial Sequence: Synthetic whey; inner sequence

SEQ ID NO: 44008 - DNA, 30 bp, Artificial Sequence; identical to SEQ ID NO: 20
  Description of Artificial Sequence: Synthetic whey; inner sequence

SEQ ID NO: 44009 - DNA, 30 bp, Artificial Sequence; identical to SEQ ID NO: 11
  Description of Artificial Sequence: Synthetic whey; inner sequence

SEQ ID NO: 44010 - DNA, 30 bp, Artificial Sequence; identical to SEQ ID NO: 3
  Description of Artificial Sequence: Synthetic whey; inner sequence

SEQ ID NO: 44011 - DNA, 30 bp, Artificial Sequence; identical to SEQ ID NO: 7
  Description of Artificial Sequence: Synthetic whey; inner sequence

SEQ ID NO: 44012 - DNA, 30 bp, Artificial Sequence; identical to SEQ ID NO: 52
  Description of Artificial Sequence: Synthetic whey; inner sequence

SEQ ID NO: 44013 - DNA, 30 bp, Artificial Sequence; identical to SEQ ID NO: 5
  Description of Artificial Sequence: Synthetic whey; inner sequence

SEQ ID NO: 44014 - DNA, 30 bp, Artificial Sequence; identical to SEQ ID NO: 28
  Description of Artificial Sequence: Synthetic whey; inner sequence

SEQ ID NO: 44015 - DNA, 30 bp, Artificial Sequence; identical to SEQ ID NO: 10
  Description of Artificial Sequence: Synthetic whey; inner sequence

SEQ ID NO: 44016 - DNA, 30 bp, Artificial Sequence; identical to SEQ ID NO: 14
  Description of Artificial Sequence: Synthetic whey; inner sequence

SEQ ID NO: 44017 - DNA, 30 bp, Artificial Sequence; identical to SEQ ID NO: 81
  Description of Artificial Sequence: Synthetic whey; inner sequence

SEQ ID NO: 44018 - DNA, 30 bp, Artificial Sequence; identical to SEQ ID NO: 201
  Description of Artificial Sequence: Synthetic whey; inner sequence

SEQ ID NO: 44019 - DNA, 30 bp, Artificial Sequence; identical to SEQ ID NO: 33
  Description of Artificial Sequence: Synthetic whey; inner sequence

SEQ ID NO: 44020 - DNA, 30 bp, Artificial Sequence; identical to SEQ ID NO: 40
  Description of Artificial Sequence: Synthetic whey; inner sequence

SEQ ID NO: 44021 - DNA, 30 bp, Artificial Sequence; identical to SEQ ID NO: 220
  Description of Artificial Sequence: Synthetic whey; inner sequence

SEQ ID NO: 44022 - DNA, 28 bp, Artificial Sequence
  Description of Artificial Sequence: Synthetic whey; inner sequence
ggacgcaacgtaccgtatcgtggccatg

SEQ ID NO: 44023 - DNA, 30 bp, Artificial Sequence; identical to SEQ ID NO: 458
  Description of Artificial Sequence: Synthetic whey; inner sequence

SEQ ID NO: 44024 - DNA, 30 bp, Artificial Sequence; identical to SEQ ID NO: 16640
  Description of Artificial Sequence: Synthetic whey; inner sequence

SEQ ID NO: 44025 - DNA, 30 bp, Artificial Sequence; identical to SEQ ID NO: 30
  Description of Artificial Sequence: Synthetic whey; inner sequence

SEQ ID NO: 44026 - DNA, 30 bp, Artificial Sequence; identical to SEQ ID NO: 46
  Description of Artificial Sequence: Synthetic whey; inner sequence

SEQ ID NO: 44027 - DNA, 30 bp, Artificial Sequence; identical to SEQ ID NO: 12
  Description of Artificial Sequence: Synthetic whey; inner sequence

SEQ ID NO: 44028 - DNA, 30 bp, Artificial Sequence; identical to SEQ ID NO: 36
  Description of Artificial Sequence: Synthetic whey; inner sequence

SEQ ID NO: 44029 - DNA, 30 bp, Artificial Sequence; identical to SEQ ID NO: 78
  Description of Artificial Sequence: Synthetic whey; inner sequence

SEQ ID NO: 44030 - DNA, 30 bp, Artificial Sequence; identical to SEQ ID NO: 279
  Description of Artificial Sequence: Synthetic whey; inner sequence

SEQ ID NO: 44031 - DNA, 30 bp, Artificial Sequence; identical to SEQ ID NO: 491
  Description of Artificial Sequence: Synthetic whey; inner sequence

SEQ ID NO: 44032 - DNA, 30 bp, Artificial Sequence; identical to SEQ ID NO: 108
  Description of Artificial Sequence: Synthetic whey; inner sequence

SEQ ID NO: 44033 - DNA, 30 bp, Artificial Sequence; identical to SEQ ID NO: 20468
  Description of Artificial Sequence: Synthetic whey; inner sequence

SEQ ID NO: 44034 - DNA, 30 bp, Artificial Sequence; identical to SEQ ID NO: 115
  Description of Artificial Sequence: Synthetic whey; inner sequence

SEQ ID NO: 44035 - DNA, 30 bp, Artificial Sequence; identical to SEQ ID NO: 20466
  Description of Artificial Sequence: Synthetic whey; inner sequence

SEQ ID NO: 44036 - DNA, 30 bp, Artificial Sequence; identical to SEQ ID NO: 63
  Description of Artificial Sequence: Synthetic whey; inner sequence

SEQ ID NO: 44037 - DNA, 30 bp, Artificial Sequence; identical to SEQ ID NO: 526
  Description of Artificial Sequence: Synthetic whey; inner sequence

SEQ ID NO: 44038 - DNA, 30 bp, Artificial Sequence; identical to SEQ ID NO: 15
  Description of Artificial Sequence: Synthetic whey; inner sequence

SEQ ID NO: 44039 - DNA, 30 bp, Artificial Sequence; identical to SEQ ID NO: 16266
  Description of Artificial Sequence: Synthetic whey; inner sequence

SEQ ID NO: 44040 - DNA, 30 bp, Artificial Sequence; identical to SEQ ID NO: 23
  Description of Artificial Sequence: Synthetic whey; inner sequence

SEQ ID NO: 44041 - DNA, 30 bp, Artificial Sequence; identical to SEQ ID NO: 323
  Description of Artificial Sequence: Synthetic whey; inner sequence

SEQ ID NO: 44042 - DNA, 30 bp, Artificial Sequence; identical to SEQ ID NO: 71
  Description of Artificial Sequence: Synthetic whey; inner sequence

SEQ ID NO: 44043 - DNA, 30 bp, Artificial Sequence; identical to SEQ ID NO: 18
  Description of Artificial Sequence: Synthetic whey; inner sequence

SEQ ID NO: 44044 - DNA, 30 bp, Artificial Sequence; identical to SEQ ID NO: 506
  Description of Artificial Sequence: Synthetic whey; inner sequence

SEQ ID NO: 44045 - DNA, 30 bp, Artificial Sequence; identical to SEQ ID NO: 340
  Description of Artificial Sequence: Synthetic whey; inner sequence

SEQ ID NO: 44046 - DNA, 30 bp, Artificial Sequence; identical to SEQ ID NO: 145
  Description of Artificial Sequence: Synthetic whey; inner sequence

SEQ ID NO: 44047 - DNA, 30 bp, Artificial Sequence; identical to SEQ ID NO: 28208
  Description of Artificial Sequence: Synthetic whey; inner sequence

SEQ ID NO: 44048 - DNA, 30 bp, Artificial Sequence; identical to SEQ ID NO: 66
  Description of Artificial Sequence: Synthetic whey; inner sequence

SEQ ID NO: 44049 - DNA, 30 bp, Artificial Sequence; identical to SEQ ID NO: 110
  Description of Artificial Sequence: Synthetic whey; inner sequence

SEQ ID NO: 44050 - DNA, 30 bp, Artificial Sequence; identical to SEQ ID NO: 131
  Description of Artificial Sequence: Synthetic whey; inner sequence

SEQ ID NO: 44051 - DNA, 30 bp, Artificial Sequence; identical to SEQ ID NO: 35
  Description of Artificial Sequence: Synthetic whey; inner sequence

SEQ ID NO: 44052 - DNA, 30 bp, Artificial Sequence; identical to SEQ ID NO: 45
  Description of Artificial Sequence: Synthetic whey; inner sequence

SEQ ID NO: 44053 - DNA, 30 bp, Artificial Sequence; identical to SEQ ID NO: 16819
  Description of Artificial Sequence: Synthetic whey; inner sequence

SEQ ID NO: 44054 - DNA, 30 bp, Artificial Sequence; identical to SEQ ID NO: 369
  Description of Artificial Sequence: Synthetic whey; inner sequence

SEQ ID NO: 44055 - DNA, 30 bp, Artificial Sequence; identical to SEQ ID NO: 22
  Description of Artificial Sequence: Synthetic whey; inner sequence

SEQ ID NO: 44056 - DNA, 30 bp, Artificial Sequence; identical to SEQ ID NO: 28199
  Description of Artificial Sequence: Synthetic whey; inner sequence

SEQ ID NO: 44057 - DNA, 30 bp, Artificial Sequence; identical to SEQ ID NO: 121
  Description of Artificial Sequence: Synthetic whey; inner sequence

SEQ ID NO: 44058 - DNA, 30 bp, Artificial Sequence; identical to SEQ ID NO: 454
  Description of Artificial Sequence: Synthetic whey; inner sequence

SEQ ID NO: 44059 - DNA, 30 bp, Artificial Sequence; identical to SEQ ID NO: 16818
  Description of Artificial Sequence: Synthetic whey; inner sequence

SEQ ID NO: 44060 - DNA, 30 bp, Artificial Sequence; identical to SEQ ID NO: 381
  Description of Artificial Sequence: Synthetic whey; inner sequence

SEQ ID NO: 44061 - DNA, 30 bp, Artificial Sequence; identical to SEQ ID NO: 79
  Description of Artificial Sequence: Synthetic whey; inner sequence

SEQ ID NO: 44062 - DNA, 30 bp, Artificial Sequence; identical to SEQ ID NO: 37
  Description of Artificial Sequence: Synthetic whey; inner sequence

SEQ ID NO: 44063 - DNA, 31 bp, Artificial Sequence; identical to SEQ ID NO: 16373
  Description of Artificial Sequence: Synthetic whey; inner sequence

SEQ ID NO: 44064 - DNA, 30 bp, Artificial Sequence; identical to SEQ ID NO: 28252
  Description of Artificial Sequence: Synthetic whey; inner sequence

SEQ ID NO: 44065 - DNA, 30 bp, Artificial Sequence; identical to SEQ ID NO: 86
  Description of Artificial Sequence: Synthetic whey; inner sequence

SEQ ID NO: 44066 - DNA, 30 bp, Artificial Sequence; identical to SEQ ID NO: 51
  Description of Artificial Sequence: Synthetic whey; inner sequence

SEQ ID NO: 44067 - DNA, 30 bp, Artificial Sequence; identical to SEQ ID NO: 41
  Description of Artificial Sequence: Synthetic whey; inner sequence

SEQ ID NO: 44068 - DNA, 30 bp, Artificial Sequence; identical to SEQ ID NO: 16
  Description of Artificial Sequence: Synthetic whey; inner sequence

SEQ ID NO: 44069 - DNA, 30 bp, Artificial Sequence; identical to SEQ ID NO: 20495
  Description of Artificial Sequence: Synthetic whey; inner sequence

SEQ ID NO: 44070 - DNA, 30 bp, Artificial Sequence; identical to SEQ ID NO: 77
  Description of Artificial Sequence: Synthetic whey; inner sequence

SEQ ID NO: 44071 - DNA, 30 bp, Artificial Sequence; identical to SEQ ID NO: 13
  Description of Artificial Sequence: Synthetic whey; inner sequence

SEQ ID NO: 44072 - DNA, 30 bp, Artificial Sequence; identical to SEQ ID NO: 28243
  Description of Artificial Sequence: Synthetic whey; inner sequence

SEQ ID NO: 44073 - DNA, 30 bp, Artificial Sequence; identical to SEQ ID NO: 4659
  Description of Artificial Sequence: Synthetic whey; inner sequence

SEQ ID NO: 44074 - DNA, 30 bp, Artificial Sequence; identical to SEQ ID NO: 17
  Description of Artificial Sequence: Synthetic whey; inner sequence

SEQ ID NO: 44075 - DNA, 30 bp, Artificial Sequence; identical to SEQ ID NO: 25
  Description of Artificial Sequence: Synthetic whey; inner sequence

SEQ ID NO: 44076 - DNA, 30 bp, Artificial Sequence; identical to SEQ ID NO: 28743
  Description of Artificial Sequence: Synthetic whey; inner sequence

SEQ ID NO: 44077 - DNA, 30 bp, Artificial Sequence; identical to SEQ ID NO: 117
  Description of Artificial Sequence: Synthetic whey; inner sequence

SEQ ID NO: 44078 - DNA, 30 bp, Artificial Sequence; identical to SEQ ID NO: 138
  Description of Artificial Sequence: Synthetic whey; inner sequence

SEQ ID NO: 44079 - DNA, 30 bp, Artificial Sequence; identical to SEQ ID NO: 217
  Description of Artificial Sequence: Synthetic whey; inner sequence

SEQ ID NO: 44080 - DNA, 30 bp, Artificial Sequence; identical to SEQ ID NO: 20504
  Description of Artificial Sequence: Synthetic whey; inner sequence

SEQ ID NO: 44081 - DNA, 30 bp, Artificial Sequence; identical to SEQ ID NO: 28310
  Description of Artificial Sequence: Synthetic whey; inner sequence

SEQ ID NO: 44082 - DNA, 30 bp, Artificial Sequence; identical to SEQ ID NO: 243
  Description of Artificial Sequence: Synthetic whey; inner sequence

SEQ ID NO: 44083 - DNA, 30 bp, Artificial Sequence; identical to SEQ ID NO: 174
  Description of Artificial Sequence: Synthetic whey; inner sequence

SEQ ID NO: 44084 - DNA, 30 bp, Artificial Sequence; identical to SEQ ID NO: 697
  Description of Artificial Sequence: Synthetic whey; inner sequence

SEQ ID NO: 44085 - DNA, 30 bp, Artificial Sequence; identical to SEQ ID NO: 27
  Description of Artificial Sequence: Synthetic whey; inner sequence

SEQ ID NO: 44086 - DNA, 30 bp, Artificial Sequence; identical to SEQ ID NO: 344
  Description of Artificial Sequence: Synthetic whey; inner sequence

SEQ ID NO: 44087 - DNA, 30 bp, Artificial Sequence; identical to SEQ ID NO: 49
  Description of Artificial Sequence: Synthetic whey; inner sequence

SEQ ID NO: 44088 - DNA, 30 bp, Artificial Sequence; identical to SEQ ID NO: 194
  Description of Artificial Sequence: Synthetic whey; inner sequence

SEQ ID NO: 44089 - DNA, 30 bp, Artificial Sequence; identical to SEQ ID NO: 372
  Description of Artificial Sequence: Synthetic whey; inner sequence

SEQ ID NO: 44090 - DNA, 30 bp, Artificial Sequence; identical to SEQ ID NO: 16603
  Description of Artificial Sequence: Synthetic whey; inner sequence

SEQ ID NO: 44091 - DNA, 30 bp, Artificial Sequence; identical to SEQ ID NO: 28477
  Description of Artificial Sequence: Synthetic whey; inner sequence

SEQ ID NO: 44092 - DNA, 30 bp, Artificial Sequence; identical to SEQ ID NO: 184
  Description of Artificial Sequence: Synthetic whey; inner sequence

SEQ ID NO: 44093 - DNA, 30 bp, Artificial Sequence; identical to SEQ ID NO: 290
  Description of Artificial Sequence: Synthetic whey; inner sequence

SEQ ID NO: 44094 - DNA, 30 bp, Artificial Sequence; identical to SEQ ID NO: 249
  Description of Artificial Sequence: Synthetic whey; inner sequence

SEQ ID NO: 44095 - DNA, 30 bp, Artificial Sequence; identical to SEQ ID NO: 20540
  Description of Artificial Sequence: Synthetic whey; inner sequence

SEQ ID NO: 44096 - DNA, 30 bp, Artificial Sequence; identical to SEQ ID NO: 20105
  Description of Artificial Sequence: Synthetic whey; inner sequence

SEQ ID NO: 44097 - DNA, 30 bp, Artificial Sequence; identical to SEQ ID NO: 228
  Description of Artificial Sequence: Synthetic whey; inner sequence

SEQ ID NO: 44098 - DNA, 30 bp, Artificial Sequence; identical to SEQ ID NO: 19
  Description of Artificial Sequence: Synthetic whey; inner sequence

SEQ ID NO: 44099 - DNA, 30 bp, Artificial Sequence; identical to SEQ ID NO: 281
  Description of Artificial Sequence: Synthetic whey; inner sequence

SEQ ID NO: 44100 - DNA, 30 bp, Artificial Sequence; identical to SEQ ID NO: 20486
  Description of Artificial Sequence: Synthetic whey; inner sequence

SEQ ID NO: 44101 - DNA, 30 bp, Artificial Sequence; identical to SEQ ID NO: 53
  Description of Artificial Sequence: Synthetic whey; inner sequence

SEQ ID NO: 44102 - DNA, 30 bp, Artificial Sequence; identical to SEQ ID NO: 442
  Description of Artificial Sequence: Synthetic whey; inner sequence

SEQ ID NO: 44103 - DNA, 30 bp, Artificial Sequence; identical to SEQ ID NO: 72
  Description of Artificial Sequence: Synthetic whey; inner sequence

SEQ ID NO: 44104 - DNA, 30 bp, Artificial Sequence; identical to SEQ ID NO: 283
  Description of Artificial Sequence: Synthetic whey; inner sequence

SEQ ID NO: 44105 - DNA, 30 bp, Artificial Sequence; identical to SEQ ID NO: 123
  Description of Artificial Sequence: Synthetic whey; inner sequence

SEQ ID NO: 44106 - DNA, 30 bp, Artificial Sequence; identical to SEQ ID NO: 12997
  Description of Artificial Sequence: Synthetic whey; inner sequence

SEQ ID NO: 44107 - DNA, 30 bp, Artificial Sequence; identical to SEQ ID NO: 776
  Description of Artificial Sequence: Synthetic whey; inner sequence

SEQ ID NO: 44108 - DNA, 31 bp, Artificial Sequence; identical to SEQ ID NO: 971
  Description of Artificial Sequence: Synthetic whey; inner sequence

SEQ ID NO: 44109 - DNA, 30 bp, Artificial Sequence; identical to SEQ ID NO: 28379
  Description of Artificial Sequence: Synthetic whey; inner sequence

SEQ ID NO: 44110 - DNA, 30 bp, Artificial Sequence; identical to SEQ ID NO: 232
  Description of Artificial Sequence: Synthetic whey; inner sequence

SEQ ID NO: 44111 - DNA, 30 bp, Artificial Sequence
  Description of Artificial Sequence: Synthetic whey; inner sequence
gtcactgtgcctgaccttcaagttgcggca

SEQ ID NO: 44112 - DNA, 30 bp, Artificial Sequence
  Description of Artificial Sequence: Synthetic whey; inner sequence
gcacgactcgcaccctatcatgttggcatg

SEQ ID NO: 44113 - DNA, 30 bp, Artificial Sequence; identical to SEQ ID NO: 73
  Description of Artificial Sequence: Synthetic whey; inner sequence

SEQ ID NO: 44114 - DNA, 30 bp, Artificial Sequence; identical to SEQ ID NO: 20524
  Description of Artificial Sequence: Synthetic whey; inner sequence

SEQ ID NO: 44115 - DNA, 30 bp, Artificial Sequence; identical to SEQ ID NO: 4336
  Description of Artificial Sequence: Synthetic whey; inner sequence

SEQ ID NO: 44116 - DNA, 30 bp, Artificial Sequence
  Description of Artificial Sequence: Synthetic whey; inner sequence
acgacaacgcgatgacgtacgtacgatgtg

SEQ ID NO: 44117 - DNA, 30 bp, Artificial Sequence; identical to SEQ ID NO: 28735
  Description of Artificial Sequence: Synthetic whey; inner sequence

SEQ ID NO: 44118 - DNA, 30 bp, Artificial Sequence; identical to SEQ ID NO: 16211
  Description of Artificial Sequence: Synthetic whey; inner sequence

SEQ ID NO: 44119 - DNA, 30 bp, Artificial Sequence; identical to SEQ ID NO: 613
  Description of Artificial Sequence: Synthetic whey; inner sequence

SEQ ID NO: 44120 - DNA, 30 bp, Artificial Sequence; identical to SEQ ID NO: 31
  Description of Artificial Sequence: Synthetic whey; inner sequence

SEQ ID NO: 44121 - DNA, 30 bp, Artificial Sequence; identical to SEQ ID NO: 343
  Description of Artificial Sequence: Synthetic whey; inner sequence

SEQ ID NO: 44122 - DNA, 30 bp, Artificial Sequence; identical to SEQ ID NO: 47
  Description of Artificial Sequence: Synthetic whey; inner sequence

SEQ ID NO: 44123 - DNA, 30 bp, Artificial Sequence; identical to SEQ ID NO: 684
  Description of Artificial Sequence: Synthetic whey; inner sequence

SEQ ID NO: 44124 - DNA, 30 bp, Artificial Sequence; identical to SEQ ID NO: 212
  Description of Artificial Sequence: Synthetic whey; inner sequence

SEQ ID NO: 44125 - DNA, 30 bp, Artificial Sequence; identical to SEQ ID NO: 28436
  Description of Artificial Sequence: Synthetic whey; inner sequence

SEQ ID NO: 44126 - DNA, 30 bp, Artificial Sequence; identical to SEQ ID NO: 8946
  Description of Artificial Sequence: Synthetic whey; inner sequence

SEQ ID NO: 44127 - DNA, 30 bp, Artificial Sequence
  Description of Artificial Sequence: Synthetic whey; inner sequence
acgtcacgatgcacaagggcgtgctgcacg

SEQ ID NO: 44128 - DNA, 30 bp, Artificial Sequence; identical to SEQ ID NO: 467
  Description of Artificial Sequence: Synthetic whey; inner sequence

SEQ ID NO: 44129 - DNA, 30 bp, Artificial Sequence; identical to SEQ ID NO: 67
  Description of Artificial Sequence: Synthetic whey; inner sequence

SEQ ID NO: 44130 - DNA, 30 bp, Artificial Sequence; identical to SEQ ID NO: 28315
  Description of Artificial Sequence: Synthetic whey; inner sequence

SEQ ID NO: 44131 - DNA, 30 bp, Artificial Sequence; identical to SEQ ID NO: 28985
  Description of Artificial Sequence: Synthetic whey; inner sequence

SEQ ID NO: 44132 - DNA, 30 bp, Artificial Sequence; identical to SEQ ID NO: 172
  Description of Artificial Sequence: Synthetic whey; inner sequence

SEQ ID NO: 44133 - DNA, 30 bp, Artificial Sequence
  Description of Artificial Sequence: Synthetic whey; inner sequence
gtacgcatcgtcccgtcatgtggttgtgga

SEQ ID NO: 44134 - DNA, 30 bp, Artificial Sequence; identical to SEQ ID NO: 272
  Description of Artificial Sequence: Synthetic whey; inner sequence

SEQ ID NO: 44135 - DNA, 30 bp, Artificial Sequence; identical to SEQ ID NO: 359
  Description of Artificial Sequence: Synthetic whey; inner sequence

SEQ ID NO: 44136 - DNA, 30 bp, Artificial Sequence; identical to SEQ ID NO: 886
  Description of Artificial Sequence: Synthetic whey; inner sequence

SEQ ID NO: 44137 - DNA, 30 bp, Artificial Sequence; identical to SEQ ID NO: 229
  Description of Artificial Sequence: Synthetic whey; inner sequence

SEQ ID NO: 44138 - DNA, 30 bp, Artificial Sequence; identical to SEQ ID NO: 379
  Description of Artificial Sequence: Synthetic whey; inner sequence

SEQ ID NO: 44139 - DNA, 30 bp, Artificial Sequence; identical to SEQ ID NO: 28471
  Description of Artificial Sequence: Synthetic whey; inner sequence

SEQ ID NO: 44140 - DNA, 30 bp, Artificial Sequence
  Description of Artificial Sequence: Synthetic whey; inner sequence
acgtcacacgtcgagttacgctacgacacg

SEQ ID NO: 44141 - DNA, 30 bp, Artificial Sequence; identical to SEQ ID NO: 28244
  Description of Artificial Sequence: Synthetic whey; inner sequence

SEQ ID NO: 44142 - DNA, 30 bp, Artificial Sequence; identical to SEQ ID NO: 12775
  Description of Artificial Sequence: Synthetic whey; inner sequence

SEQ ID NO: 44143 - DNA, 30 bp, Artificial Sequence; identical to SEQ ID NO: 61
  Description of Artificial Sequence: Synthetic whey; inner sequence

SEQ ID NO: 44144 - DNA, 30 bp, Artificial Sequence; identical to SEQ ID NO: 29
  Description of Artificial Sequence: Synthetic whey; inner sequence

SEQ ID NO: 44145 - DNA, 30 bp, Artificial Sequence; identical to SEQ ID NO: 28108
  Description of Artificial Sequence: Synthetic whey; inner sequence

SEQ ID NO: 44146 - DNA, 30 bp, Artificial Sequence; identical to SEQ ID NO: 611
  Description of Artificial Sequence: Synthetic whey; inner sequence

SEQ ID NO: 44147 - DNA, 30 bp, Artificial Sequence; identical to SEQ ID NO: 457
  Description of Artificial Sequence: Synthetic whey; inner sequence

SEQ ID NO: 44148 - DNA, 30 bp, Artificial Sequence; identical to SEQ ID NO: 178
  Description of Artificial Sequence: Synthetic whey; inner sequence

SEQ ID NO: 44149 - DNA, 30 bp, Artificial Sequence; identical to SEQ ID NO: 746
  Description of Artificial Sequence: Synthetic whey; inner sequence

SEQ ID NO: 44150 - DNA, 30 bp, Artificial Sequence; identical to SEQ ID NO: 225
  Description of Artificial Sequence: Synthetic whey; inner sequence

SEQ ID NO: 44151 - DNA, 30 bp, Artificial Sequence
  Description of Artificial Sequence: Synthetic whey; inner sequence
gtacgcatcgtcccttcatgtggttccgta

SEQ ID NO: 44152 - DNA, 30 bp, Artificial Sequence; identical to SEQ ID NO: 16859
  Description of Artificial Sequence: Synthetic whey; inner sequence

SEQ ID NO: 44153 - DNA, 29 bp, Artificial Sequence
  Description of Artificial Sequence: Synthetic whey; inner sequence
gtcatgccatcccttcgagtggacaggta

SEQ ID NO: 44154 - DNA, 31 bp, Artificial Sequence; identical to SEQ ID NO: 221
  Description of Artificial Sequence: Synthetic whey; inner sequence

SEQ ID NO: 44155 - DNA, 30 bp, Artificial Sequence; identical to SEQ ID NO: 28147
  Description of Artificial Sequence: Synthetic whey; inner sequence

SEQ ID NO: 44156 - DNA, 30 bp, Artificial Sequence; identical to SEQ ID NO: 16978
  Description of Artificial Sequence: Synthetic whey; inner sequence

SEQ ID NO: 44157 - DNA, 30 bp, Artificial Sequence; identical to SEQ ID NO: 8876
  Description of Artificial Sequence: Synthetic whey; inner sequence

SEQ ID NO: 44158 - DNA, 30 bp, Artificial Sequence; identical to SEQ ID NO: 20617
  Description of Artificial Sequence: Synthetic whey; inner sequence

SEQ ID NO: 44159 - DNA, 30 bp, Artificial Sequence
  Description of Artificial Sequence: Synthetic whey; inner sequence
cgtgcacacgacgacatgcactacgttgcc

SEQ ID NO: 44160 - DNA, 30 bp, Artificial Sequence; identical to SEQ ID NO: 38
  Description of Artificial Sequence: Synthetic whey; inner sequence

SEQ ID NO: 44161 - DNA, 30 bp, Artificial Sequence; identical to SEQ ID NO: 622
  Description of Artificial Sequence: Synthetic whey; inner sequence

SEQ ID NO: 44162 - DNA, 30 bp, Artificial Sequence; identical to SEQ ID NO: 144
  Description of Artificial Sequence: Synthetic whey; inner sequence

SEQ ID NO: 44163 - DNA, 30 bp, Artificial Sequence; identical to SEQ ID NO: 231
  Description of Artificial Sequence: Synthetic whey; inner sequence

SEQ ID NO: 44164 - DNA, 29 bp, Artificial Sequence
  Description of Artificial Sequence: Synthetic whey; inner sequence
cgtgtgtgacgtacatgacgtgcttcgtg

SEQ ID NO: 44165 - DNA, 30 bp, Artificial Sequence; identical to SEQ ID NO: 20151
  Description of Artificial Sequence: Synthetic whey; inner sequence

SEQ ID NO: 44166 - DNA, 30 bp, Artificial Sequence
  Description of Artificial Sequence: Synthetic whey; inner sequence
gtcactgtgcctgaccgtcaagttgtggca

SEQ ID NO: 44167 - DNA, 30 bp, Artificial Sequence; identical to SEQ ID NO: 151
  Description of Artificial Sequence: Synthetic whey; inner sequence

SEQ ID NO: 44168 - DNA, 30 bp, Artificial Sequence; identical to SEQ ID NO: 28497
  Description of Artificial Sequence: Synthetic whey; inner sequence

SEQ ID NO: 44169 - DNA, 30 bp, Artificial Sequence; identical to SEQ ID NO: 303
  Description of Artificial Sequence: Synthetic whey; inner sequence

SEQ ID NO: 44170 - DNA, 30 bp, Artificial Sequence; identical to SEQ ID NO: 98
  Description of Artificial Sequence: Synthetic whey; inner sequence

SEQ ID NO: 44171 - DNA, 30 bp, Artificial Sequence; identical to SEQ ID NO: 352
  Description of Artificial Sequence: Synthetic whey; inner sequence

SEQ ID NO: 44172 - DNA, 30 bp, Artificial Sequence; identical to SEQ ID NO: 50
  Description of Artificial Sequence: Synthetic whey; inner sequence

SEQ ID NO: 44173 - DNA, 30 bp, Artificial Sequence; identical to SEQ ID NO: 20551
  Description of Artificial Sequence: Synthetic whey; inner sequence

SEQ ID NO: 44174 - DNA, 30 bp, Artificial Sequence; identical to SEQ ID NO: 26
  Description of Artificial Sequence: Synthetic whey; inner sequence

SEQ ID NO: 44175 - DNA, 30 bp, Artificial Sequence; identical to SEQ ID NO: 28526
  Description of Artificial Sequence: Synthetic whey; inner sequence

SEQ ID NO: 44176 - DNA, 30 bp, Artificial Sequence; identical to SEQ ID NO: 353
  Description of Artificial Sequence: Synthetic whey; inner sequence

SEQ ID NO: 44177 - DNA, 30 bp, Artificial Sequence; identical to SEQ ID NO: 20560
  Description of Artificial Sequence: Synthetic whey; inner sequence

SEQ ID NO: 44178 - DNA, 30 bp, Artificial Sequence; identical to SEQ ID NO: 181
  Description of Artificial Sequence: Synthetic whey; inner sequence

SEQ ID NO: 44179 - DNA, 30 bp, Artificial Sequence; identical to SEQ ID NO: 728
  Description of Artificial Sequence: Synthetic whey; inner sequence

SEQ ID NO: 44180 - DNA, 30 bp, Artificial Sequence; identical to SEQ ID NO: 24
  Description of Artificial Sequence: Synthetic whey; inner sequence

SEQ ID NO: 44181 - DNA, 30 bp, Artificial Sequence; identical to SEQ ID NO: 884
  Description of Artificial Sequence: Synthetic whey; inner sequence

SEQ ID NO: 44182 - DNA, 30 bp, Artificial Sequence
  Description of Artificial Sequence: Synthetic whey; inner sequence
acgtcacggcatgcgtcacactgatgcatg

SEQ ID NO: 44183 - DNA, 30 bp, Artificial Sequence; identical to SEQ ID NO: 617
  Description of Artificial Sequence: Synthetic whey; inner sequence

SEQ ID NO: 44184 - DNA, 30 bp, Artificial Sequence; identical to SEQ ID NO: 32743
  Description of Artificial Sequence: Synthetic whey; inner sequence

SEQ ID NO: 44185 - DNA, 30 bp, Artificial Sequence; identical to SEQ ID NO: 419
  Description of Artificial Sequence: Synthetic whey; inner sequence

SEQ ID NO: 44186 - DNA, 30 bp, Artificial Sequence; identical to SEQ ID NO: 891
  Description of Artificial Sequence: Synthetic whey; inner sequence

SEQ ID NO: 44187 - DNA, 30 bp, Artificial Sequence; identical to SEQ ID NO: 365
  Description of Artificial Sequence: Synthetic whey; inner sequence

SEQ ID NO: 44188 - DNA, 30 bp, Artificial Sequence; identical to SEQ ID NO: 615
  Description of Artificial Sequence: Synthetic whey; inner sequence

SEQ ID NO: 44189 - DNA, 30 bp, Artificial Sequence
  Description of Artificial Sequence: Synthetic whey; inner sequence
gtacgactcgcaccctatcatgtaggcatg

SEQ ID NO: 44190 - DNA, 30 bp, Artificial Sequence; identical to SEQ ID NO: 28541
  Description of Artificial Sequence: Synthetic whey; inner sequence

SEQ ID NO: 44191 - DNA, 30 bp, Artificial Sequence
  Description of Artificial Sequence: Synthetic whey; inner sequence
gtcactgcgcctgaccgtcaagttgcggca

SEQ ID NO: 44192 - DNA, 30 bp, Artificial Sequence; identical to SEQ ID NO: 414
  Description of Artificial Sequence: Synthetic whey; inner sequence

SEQ ID NO: 44193 - DNA, 30 bp, Artificial Sequence; identical to SEQ ID NO: 28400
  Description of Artificial Sequence: Synthetic whey; inner sequence

SEQ ID NO: 44194 - DNA, 30 bp, Artificial Sequence; identical to SEQ ID NO: 28793
  Description of Artificial Sequence: Synthetic whey; inner sequence

SEQ ID NO: 44195 - DNA, 30 bp, Artificial Sequence; identical to SEQ ID NO: 129
  Description of Artificial Sequence: Synthetic whey; inner sequence

SEQ ID NO: 44196 - DNA, 30 bp, Artificial Sequence; identical to SEQ ID NO: 16861
  Description of Artificial Sequence: Synthetic whey; inner sequence

SEQ ID NO: 44197 - DNA, 30 bp, Artificial Sequence; identical to SEQ ID NO: 320
  Description of Artificial Sequence: Synthetic whey; inner sequence

SEQ ID NO: 44198 - DNA, 30 bp, Artificial Sequence; identical to SEQ ID NO: 560
  Description of Artificial Sequence: Synthetic whey; inner sequence

SEQ ID NO: 44199 - DNA, 30 bp, Artificial Sequence; identical to SEQ ID NO: 28939
  Description of Artificial Sequence: Synthetic whey; inner sequence

SEQ ID NO: 44200 - DNA, 30 bp, Artificial Sequence; identical to SEQ ID NO: 16513
  Description of Artificial Sequence: Synthetic whey; inner sequence

SEQ ID NO: 44201 - DNA, 30 bp, Artificial Sequence; identical to SEQ ID NO: 202
  Description of Artificial Sequence: Synthetic whey; inner sequence

SEQ ID NO: 44202 - DNA, 30 bp, Artificial Sequence; identical to SEQ ID NO: 60
  Description of Artificial Sequence: Synthetic whey; inner sequence

SEQ ID NO: 44203 - DNA, 30 bp, Artificial Sequence; identical to SEQ ID NO: 20302
  Description of Artificial Sequence: Synthetic whey; inner sequence

SEQ ID NO: 44204 - DNA, 30 bp, Artificial Sequence; identical to SEQ ID NO: 517
  Description of Artificial Sequence: Synthetic whey; inner sequence

SEQ ID NO: 44205 - DNA, 30 bp, Artificial Sequence; identical to SEQ ID NO: 20889
  Description of Artificial Sequence: Synthetic whey; inner sequence

SEQ ID NO: 44206 - DNA, 30 bp, Artificial Sequence; identical to SEQ ID NO: 65
  Description of Artificial Sequence: Synthetic whey; inner sequence

SEQ ID NO: 44207 - DNA, 30 bp, Artificial Sequence; identical to SEQ ID NO: 20984
  Description of Artificial Sequence: Synthetic whey; inner sequence

SEQ ID NO: 44208 - DNA, 30 bp, Artificial Sequence; identical to SEQ ID NO: 16399
  Description of Artificial Sequence: Synthetic whey; inner sequence

SEQ ID NO: 44209 - DNA, 30 bp, Artificial Sequence; identical to SEQ ID NO: 823
  Description of Artificial Sequence: Synthetic whey; inner sequence

SEQ ID NO: 44210 - DNA, 30 bp, Artificial Sequence; identical to SEQ ID NO: 877
  Description of Artificial Sequence: Synthetic whey; inner sequence

SEQ ID NO: 44211 - DNA, 30 bp, Artificial Sequence; identical to SEQ ID NO: 20917
  Description of Artificial Sequence: Synthetic whey; inner sequence

SEQ ID NO: 44212 - DNA, 30 bp, Artificial Sequence
  Description of Artificial Sequence: Synthetic whey; inner sequence
aacgtgacgcgatcggtacgtgacgttgcg

SEQ ID NO: 44213 - DNA, 30 bp, Artificial Sequence; identical to SEQ ID NO: 192
  Description of Artificial Sequence: Synthetic whey; inner sequence

SEQ ID NO: 44214 - DNA, 30 bp, Artificial Sequence
  Description of Artificial Sequence: Synthetic whey; inner sequence
cgacacagtgcgtatcgtacgtcgtgccgc

SEQ ID NO: 44215 - DNA, 30 bp, Artificial Sequence; identical to SEQ ID NO: 28233
  Description of Artificial Sequence: Synthetic whey; inner sequence

SEQ ID NO: 44216 - DNA, 30 bp, Artificial Sequence
  Description of Artificial Sequence: Synthetic whey; inner sequence
gtcactgtgcctgcccgtcaagttgcggca

SEQ ID NO: 44217 - DNA, 30 bp, Artificial Sequence; identical to SEQ ID NO: 780
  Description of Artificial Sequence: Synthetic whey; inner sequence

SEQ ID NO: 44218 - DNA, 30 bp, Artificial Sequence; identical to SEQ ID NO: 204
  Description of Artificial Sequence: Synthetic whey; inner sequence

SEQ ID NO: 44219 - DNA, 30 bp, Artificial Sequence
  Description of Artificial Sequence: Synthetic whey; inner sequence
catgcgtcatgtccgtacgttcccgtcatg

SEQ ID NO: 44220 - DNA, 30 bp, Artificial Sequence; identical to SEQ ID NO: 4356
  Description of Artificial Sequence: Synthetic whey; inner sequence

SEQ ID NO: 44221 - DNA, 30 bp, Artificial Sequence; identical to SEQ ID NO: 28381
  Description of Artificial Sequence: Synthetic whey; inner sequence

SEQ ID NO: 44222 - DNA, 30 bp, Artificial Sequence; identical to SEQ ID NO: 4960
  Description of Artificial Sequence: Synthetic whey; inner sequence

SEQ ID NO: 44223 - DNA, 30 bp, Artificial Sequence; identical to SEQ ID NO: 90
  Description of Artificial Sequence: Synthetic whey; inner sequence

SEQ ID NO: 44224 - DNA, 30 bp, Artificial Sequence; identical to SEQ ID NO: 446
  Description of Artificial Sequence: Synthetic whey; inner sequence

SEQ ID NO: 44225 - DNA, 30 bp, Artificial Sequence
  Description of Artificial Sequence: Synthetic whey; inner sequence
acgatgcgtgacaccgtgctgcgtgtgacc

SEQ ID NO: 44226 - DNA, 30 bp, Artificial Sequence; identical to SEQ ID NO: 437
  Description of Artificial Sequence: Synthetic whey; inner sequence

SEQ ID NO: 44227 - DNA, 30 bp, Artificial Sequence
  Description of Artificial Sequence: Synthetic whey; inner sequence
gtacgcaacgtaccgtatcgtggccatgtg

SEQ ID NO: 44228 - DNA, 30 bp, Artificial Sequence; identical to SEQ ID NO: 28701
  Description of Artificial Sequence: Synthetic whey; inner sequence

SEQ ID NO: 44229 - DNA, 30 bp, Artificial Sequence; identical to SEQ ID NO: 28934
  Description of Artificial Sequence: Synthetic whey; inner sequence

SEQ ID NO: 44230 - DNA, 30 bp, Artificial Sequence; identical to SEQ ID NO: 20789
  Description of Artificial Sequence: Synthetic whey; inner sequence

SEQ ID NO: 44231 - DNA, 30 bp, Artificial Sequence; identical to SEQ ID NO: 285
  Description of Artificial Sequence: Synthetic whey; inner sequence

SEQ ID NO: 44232 - DNA, 30 bp, Artificial Sequence; identical to SEQ ID NO: 28699
  Description of Artificial Sequence: Synthetic whey; inner sequence

SEQ ID NO: 44233 - DNA, 30 bp, Artificial Sequence; identical to SEQ ID NO: 28995
  Description of Artificial Sequence: Synthetic whey; inner sequence

SEQ ID NO: 44234 - DNA, 29 bp, Artificial Sequence
  Description of Artificial Sequence: Synthetic whey; inner sequence
gcacgtcgaaacacgtagccatgcacggt

SEQ ID NO: 44235 - DNA, 30 bp, Artificial Sequence; identical to SEQ ID NO: 20994
  Description of Artificial Sequence: Synthetic whey; inner sequence

SEQ ID NO: 44236 - DNA, 30 bp, Artificial Sequence; identical to SEQ ID NO: 20426
  Description of Artificial Sequence: Synthetic whey; inner sequence

SEQ ID NO: 44237 - DNA, 30 bp, Artificial Sequence
  Description of Artificial Sequence: Synthetic whey; inner sequence
gtcactgtgcctgaccgtcaagttgcggta

SEQ ID NO: 44238 - DNA, 30 bp, Artificial Sequence
  Description of Artificial Sequence: Synthetic whey; inner sequence
gtcatgccatcccctcgagtgtgacaggta

SEQ ID NO: 44239 - DNA, 30 bp, Artificial Sequence; identical to SEQ ID NO: 358
  Description of Artificial Sequence: Synthetic whey; inner sequence

SEQ ID NO: 44240 - DNA, 30 bp, Artificial Sequence; identical to SEQ ID NO: 28278
  Description of Artificial Sequence: Synthetic whey; inner sequence

SEQ ID NO: 44241 - DNA, 30 bp, Artificial Sequence; identical to SEQ ID NO: 28924
  Description of Artificial Sequence: Synthetic whey; inner sequence

SEQ ID NO: 44242 - DNA, 30 bp, Artificial Sequence; identical to SEQ ID NO: 161
  Description of Artificial Sequence: Synthetic whey; inner sequence

SEQ ID NO: 44243 - DNA, 30 bp, Artificial Sequence; identical to SEQ ID NO: 727
  Description of Artificial Sequence: Synthetic whey; inner sequence

SEQ ID NO: 44244 - DNA, 30 bp, Artificial Sequence; identical to SEQ ID NO: 8868
  Description of Artificial Sequence: Synthetic whey; inner sequence

SEQ ID NO: 44245 - DNA, 30 bp, Artificial Sequence
  Description of Artificial Sequence: Synthetic whey; inner sequence
gtcatgcacgaacactatcatgtaggcatg

SEQ ID NO: 44246 - DNA, 30 bp, Artificial Sequence; identical to SEQ ID NO: 429
  Description of Artificial Sequence: Synthetic whey; inner sequence

SEQ ID NO: 44247 - DNA, 30 bp, Artificial Sequence; identical to SEQ ID NO: 227
  Description of Artificial Sequence: Synthetic whey; inner sequence

SEQ ID NO: 44248 - DNA, 30 bp, Artificial Sequence; identical to SEQ ID NO: 28782
  Description of Artificial Sequence: Synthetic whey; inner sequence

SEQ ID NO: 44249 - DNA, 30 bp, Artificial Sequence
  Description of Artificial Sequence: Synthetic whey; inner sequence
acgtcacgcaaggaacgttacgcatgcgcg

SEQ ID NO: 44250 - DNA, 30 bp, Artificial Sequence; identical to SEQ ID NO: 486
  Description of Artificial Sequence: Synthetic whey; inner sequence

SEQ ID NO: 44251 - DNA, 30 bp, Artificial Sequence
  Description of Artificial Sequence: Synthetic whey; inner sequence
gtccctgtgcctgaccgtcaagttgcggca

SEQ ID NO: 44252 - DNA, 30 bp, Artificial Sequence; identical to SEQ ID NO: 8627
  Description of Artificial Sequence: Synthetic whey; inner sequence

SEQ ID NO: 44253 - DNA, 30 bp, Artificial Sequence; identical to SEQ ID NO: 8810
  Description of Artificial Sequence: Synthetic whey; inner sequence

SEQ ID NO: 44254 - DNA, 30 bp, Artificial Sequence; identical to SEQ ID NO: 28221
  Description of Artificial Sequence: Synthetic whey; inner sequence

SEQ ID NO: 44255 - DNA, 30 bp, Artificial Sequence; identical to SEQ ID NO: 244
  Description of Artificial Sequence: Synthetic whey; inner sequence

SEQ ID NO: 44256 - DNA, 30 bp, Artificial Sequence
  Description of Artificial Sequence: Synthetic whey; inner sequence
gtaactgtgcctgaccgtcaagttgcggca

SEQ ID NO: 44257 - DNA, 30 bp, Artificial Sequence; identical to SEQ ID NO: 219
  Description of Artificial Sequence: Synthetic whey; inner sequence

SEQ ID NO: 44258 - DNA, 30 bp, Artificial Sequence; identical to SEQ ID NO: 20478
  Description of Artificial Sequence: Synthetic whey; inner sequence

SEQ ID NO: 44259 - DNA, 30 bp, Artificial Sequence
  Description of Artificial Sequence: Synthetic whey; inner sequence
cgtccgaatcgtaccgtgcatgtgcgttgt

SEQ ID NO: 44260 - DNA, 30 bp, Artificial Sequence; identical to SEQ ID NO: 12853
  Description of Artificial Sequence: Synthetic whey; inner sequence

SEQ ID NO: 44261 - DNA, 30 bp, Artificial Sequence; identical to SEQ ID NO: 20944
  Description of Artificial Sequence: Synthetic whey; inner sequence

SEQ ID NO: 44262 - DNA, 30 bp, Artificial Sequence; identical to SEQ ID NO: 383
  Description of Artificial Sequence: Synthetic whey; inner sequence

SEQ ID NO: 44263 - DNA, 30 bp, Artificial Sequence; identical to SEQ ID NO: 685
  Description of Artificial Sequence: Synthetic whey; inner sequence

SEQ ID NO: 44264 - DNA, 30 bp, Artificial Sequence; identical to SEQ ID NO: 632
  Description of Artificial Sequence: Synthetic whey; inner sequence

SEQ ID NO: 44265 - DNA, 30 bp, Artificial Sequence; identical to SEQ ID NO: 8910
  Description of Artificial Sequence: Synthetic whey; inner sequence

SEQ ID NO: 44266 - DNA, 30 bp, Artificial Sequence; identical to SEQ ID NO: 59
  Description of Artificial Sequence: Synthetic whey; inner sequence

SEQ ID NO: 44267 - DNA, 30 bp, Artificial Sequence; identical to SEQ ID NO: 28971
  Description of Artificial Sequence: Synthetic whey; inner sequence

SEQ ID NO: 44268 - DNA, 30 bp, Artificial Sequence; identical to SEQ ID NO: 492
  Description of Artificial Sequence: Synthetic whey; inner sequence

SEQ ID NO: 44269 - DNA, 30 bp, Artificial Sequence; identical to SEQ ID NO: 16585
  Description of Artificial Sequence: Synthetic whey; inner sequence

SEQ ID NO: 44270 - DNA, 30 bp, Artificial Sequence; identical to SEQ ID NO: 195
  Description of Artificial Sequence: Synthetic whey; inner sequence

SEQ ID NO: 44271 - DNA, 25 bp, Artificial Sequence
  Description of Artificial Sequence: Synthetic whey; inner sequence
cgcaccgtcaagcaggcacgtgtca

SEQ ID NO: 44272 - DNA, 30 bp, Artificial Sequence; identical to SEQ ID NO: 190
  Description of Artificial Sequence: Synthetic whey; inner sequence

SEQ ID NO: 44273 - DNA, 30 bp, Artificial Sequence; identical to SEQ ID NO: 69
  Description of Artificial Sequence: Synthetic whey; inner sequence

SEQ ID NO: 44274 - DNA, 30 bp, Artificial Sequence; identical to SEQ ID NO: 141
  Description of Artificial Sequence: Synthetic whey; inner sequence

SEQ ID NO: 44275 - DNA, 30 bp, Artificial Sequence; identical to SEQ ID NO: 169
  Description of Artificial Sequence: Synthetic whey; inner sequence

SEQ ID NO: 44276 - DNA, 30 bp, Artificial Sequence; identical to SEQ ID NO: 177
  Description of Artificial Sequence: Synthetic whey; inner sequence

SEQ ID NO: 44277 - DNA, 30 bp, Artificial Sequence; identical to SEQ ID NO: 82
  Description of Artificial Sequence: Synthetic whey; inner sequence

SEQ ID NO: 44278 - DNA, 30 bp, Artificial Sequence
  Description of Artificial Sequence: Synthetic whey; inner sequence
gtcattccatcccttcgagtgtgacaggta

SEQ ID NO: 44279 - DNA, 30 bp, Artificial Sequence; identical to SEQ ID NO: 8928
  Description of Artificial Sequence: Synthetic whey; inner sequence

SEQ ID NO: 44280 - DNA, 29 bp, Artificial Sequence
  Description of Artificial Sequence: Synthetic whey; inner sequence
gtcatgccatcccttcgagtgtgcaggta

SEQ ID NO: 44281 - DNA, 30 bp, Artificial Sequence; identical to SEQ ID NO: 16769
  Description of Artificial Sequence: Synthetic whey; inner sequence

SEQ ID NO: 44282 - DNA, 30 bp, Artificial Sequence; identical to SEQ ID NO: 149
  Description of Artificial Sequence: Synthetic whey; inner sequence

SEQ ID NO: 44283 - DNA, 30 bp, Artificial Sequence
  Description of Artificial Sequence: Synthetic whey; inner sequence
gtacgcctcgtcccgtcatgtggttccgta

SEQ ID NO: 44284 - DNA, 30 bp, Artificial Sequence; identical to SEQ ID NO: 205
  Description of Artificial Sequence: Synthetic whey; inner sequence

SEQ ID NO: 44285 - DNA, 30 bp, Artificial Sequence; identical to SEQ ID NO: 955
  Description of Artificial Sequence: Synthetic whey; inner sequence

SEQ ID NO: 44286 - DNA, 30 bp, Artificial Sequence; identical to SEQ ID NO: 644
  Description of Artificial Sequence: Synthetic whey; inner sequence

SEQ ID NO: 44287 - DNA, 30 bp, Artificial Sequence
  Description of Artificial Sequence: Synthetic whey; inner sequence
ggacgcaacgcaccgtatcgtggccatgta

SEQ ID NO: 44288 - DNA, 30 bp, Artificial Sequence; identical to SEQ ID NO: 96
  Description of Artificial Sequence: Synthetic whey; inner sequence

SEQ ID NO: 44289 - DNA, 30 bp, Artificial Sequence; identical to SEQ ID NO: 20473
  Description of Artificial Sequence: Synthetic whey; inner sequence

SEQ ID NO: 44290 - DNA, 30 bp, Artificial Sequence; identical to SEQ ID NO: 821
  Description of Artificial Sequence: Synthetic whey; inner sequence

SEQ ID NO: 44291 - DNA, 30 bp, Artificial Sequence; identical to SEQ ID NO: 28839
  Description of Artificial Sequence: Synthetic whey; inner sequence

SEQ ID NO: 44292 - DNA, 30 bp, Artificial Sequence; identical to SEQ ID NO: 397
  Description of Artificial Sequence: Synthetic whey; inner sequence

SEQ ID NO: 44293 - DNA, 30 bp, Artificial Sequence
  Description of Artificial Sequence: Synthetic whey; inner sequence
tgacgcaacgtaccgtatcgtggccatgtg

SEQ ID NO: 44294 - DNA, 29 bp, Artificial Sequence
  Description of Artificial Sequence: Synthetic whey; inner sequence
gtcatgccatcccttcgagtgtgacggta

SEQ ID NO: 44295 - DNA, 30 bp, Artificial Sequence; identical to SEQ ID NO: 48
  Description of Artificial Sequence: Synthetic whey; inner sequence

SEQ ID NO: 44296 - DNA, 30 bp, Artificial Sequence; identical to SEQ ID NO: 470
  Description of Artificial Sequence: Synthetic whey; inner sequence

SEQ ID NO: 44297 - DNA, 30 bp, Artificial Sequence
  Description of Artificial Sequence: Synthetic whey; inner sequence
gtcactgtgcctcaccgtcaagttgcggca

SEQ ID NO: 44298 - DNA, 30 bp, Artificial Sequence; identical to SEQ ID NO: 366
  Description of Artificial Sequence: Synthetic whey; inner sequence

SEQ ID NO: 44299 - DNA, 30 bp, Artificial Sequence; identical to SEQ ID NO: 901
  Description of Artificial Sequence: Synthetic whey; inner sequence

SEQ ID NO: 44300 - DNA, 29 bp, Artificial Sequence
  Description of Artificial Sequence: Synthetic whey; inner sequence
cacgtgcatggacgcgtcgtaccgtggca

SEQ ID NO: 44301 - DNA, 30 bp, Artificial Sequence
  Description of Artificial Sequence: Synthetic whey; inner sequence
agcgcaacatcgtaacgtgccatcgtcgtg

SEQ ID NO: 44302 - DNA, 30 bp, Artificial Sequence; identical to SEQ ID NO: 20879
  Description of Artificial Sequence: Synthetic whey; inner sequence

SEQ ID NO: 44303 - DNA, 30 bp, Artificial Sequence; identical to SEQ ID NO: 28993
  Description of Artificial Sequence: Synthetic whey; inner sequence

SEQ ID NO: 44304 - DNA, 30 bp, Artificial Sequence; identical to SEQ ID NO: 28921
  Description of Artificial Sequence: Synthetic whey; inner sequence

SEQ ID NO: 44305 - DNA, 30 bp, Artificial Sequence
  Description of Artificial Sequence: Synthetic whey; inner sequence
ggacgcaacgtaccttatcgtggccatgta

SEQ ID NO: 44306 - DNA, 30 bp, Artificial Sequence; identical to SEQ ID NO: 4638
  Description of Artificial Sequence: Synthetic whey; inner sequence

SEQ ID NO: 44307 - DNA, 30 bp, Artificial Sequence; identical to SEQ ID NO: 28808
  Description of Artificial Sequence: Synthetic whey; inner sequence

SEQ ID NO: 44308 - DNA, 30 bp, Artificial Sequence; identical to SEQ ID NO: 40829
  Description of Artificial Sequence: Synthetic whey; inner sequence

SEQ ID NO: 44309 - DNA, 30 bp, Artificial Sequence; identical to SEQ ID NO: 4938
  Description of Artificial Sequence: Synthetic whey; inner sequence

SEQ ID NO: 44310 - DNA, 30 bp, Artificial Sequence; identical to SEQ ID NO: 4521
  Description of Artificial Sequence: Synthetic whey; inner sequence

SEQ ID NO: 44311 - DNA, 30 bp, Artificial Sequence; identical to SEQ ID NO: 20708
  Description of Artificial Sequence: Synthetic whey; inner sequence

SEQ ID NO: 44312 - DNA, 30 bp, Artificial Sequence
  Description of Artificial Sequence: Synthetic whey; inner sequence
acgtgtcagcgtaacgtgcatgctgttgcc

SEQ ID NO: 44313 - DNA, 30 bp, Artificial Sequence; identical to SEQ ID NO: 20623
  Description of Artificial Sequence: Synthetic whey; inner sequence

SEQ ID NO: 44314 - DNA, 30 bp, Artificial Sequence
  Description of Artificial Sequence: Synthetic whey; inner sequence
gccactgtgcctgaccgtcaagttgcggca

SEQ ID NO: 44315 - DNA, 30 bp, Artificial Sequence; identical to SEQ ID NO: 185
  Description of Artificial Sequence: Synthetic whey; inner sequence

SEQ ID NO: 44316 - DNA, 28 bp, Artificial Sequence
  Description of Artificial Sequence: Synthetic whey; inner sequence
ggacgcagctgacctagcatgtgtgtca

SEQ ID NO: 44317 - DNA, 30 bp, Artificial Sequence; identical to SEQ ID NO: 619
  Description of Artificial Sequence: Synthetic whey; inner sequence

SEQ ID NO: 44318 - DNA, 30 bp, Artificial Sequence
  Description of Artificial Sequence: Synthetic whey; inner sequence
cgatgcgcatcgagcacacgtccgtacgcg

SEQ ID NO: 44319 - DNA, 30 bp, Artificial Sequence; identical to SEQ ID NO: 54
  Description of Artificial Sequence: Synthetic whey; inner sequence

SEQ ID NO: 44320 - DNA, 30 bp, Artificial Sequence; identical to SEQ ID NO: 386
  Description of Artificial Sequence: Synthetic whey; inner sequence

SEQ ID NO: 44321 - DNA, 30 bp, Artificial Sequence
  Description of Artificial Sequence: Synthetic whey; inner sequence
ggacgcaacgtaacgttcgagtggtacgta

SEQ ID NO: 44322 - DNA, 30 bp, Artificial Sequence; identical to SEQ ID NO: 20983
  Description of Artificial Sequence: Synthetic whey; inner sequence

SEQ ID NO: 44323 - DNA, 30 bp, Artificial Sequence; identical to SEQ ID NO: 28382
  Description of Artificial Sequence: Synthetic whey; inner sequence

SEQ ID NO: 44324 - DNA, 30 bp, Artificial Sequence; identical to SEQ ID NO: 267
  Description of Artificial Sequence: Synthetic whey; inner sequence

SEQ ID NO: 44325 - DNA, 30 bp, Artificial Sequence; identical to SEQ ID NO: 16837
  Description of Artificial Sequence: Synthetic whey; inner sequence

SEQ ID NO: 44326 - DNA, 30 bp, Artificial Sequence; identical to SEQ ID NO: 4289
  Description of Artificial Sequence: Synthetic whey; inner sequence

SEQ ID NO: 44327 - DNA, 30 bp, Artificial Sequence; identical to SEQ ID NO: 20836
  Description of Artificial Sequence: Synthetic whey; inner sequence

SEQ ID NO: 44328 - DNA, 29 bp, Artificial Sequence
  Description of Artificial Sequence: Synthetic whey; inner sequence
gcacgccgatgccctcatgtggccgtgga

SEQ ID NO: 44329 - DNA, 30 bp, Artificial Sequence; identical to SEQ ID NO: 4272
  Description of Artificial Sequence: Synthetic whey; inner sequence

SEQ ID NO: 44330 - DNA, 30 bp, Artificial Sequence; identical to SEQ ID NO: 860
  Description of Artificial Sequence: Synthetic whey; inner sequence

SEQ ID NO: 44331 - DNA, 30 bp, Artificial Sequence; identical to SEQ ID NO: 20769
  Description of Artificial Sequence: Synthetic whey; inner sequence

SEQ ID NO: 44332 - DNA, 30 bp, Artificial Sequence; identical to SEQ ID NO: 4933
  Description of Artificial Sequence: Synthetic whey; inner sequence

SEQ ID NO: 44333 - DNA, 30 bp, Artificial Sequence; identical to SEQ ID NO: 142
  Description of Artificial Sequence: Synthetic whey; inner sequence

SEQ ID NO: 44334 - DNA, 30 bp, Artificial Sequence; identical to SEQ ID NO: 28591
  Description of Artificial Sequence: Synthetic whey; inner sequence

SEQ ID NO: 44335 - DNA, 30 bp, Artificial Sequence; identical to SEQ ID NO: 28693
  Description of Artificial Sequence: Synthetic whey; inner sequence

SEQ ID NO: 44336 - DNA, 30 bp, Artificial Sequence; identical to SEQ ID NO: 57
  Description of Artificial Sequence: Synthetic whey; inner sequence

SEQ ID NO: 44337 - DNA, 30 bp, Artificial Sequence; identical to SEQ ID NO: 742
  Description of Artificial Sequence: Synthetic whey; inner sequence

SEQ ID NO: 44338 - DNA, 30 bp, Artificial Sequence; identical to SEQ ID NO: 8579
  Description of Artificial Sequence: Synthetic whey; inner sequence

SEQ ID NO: 44339 - DNA, 28 bp, Artificial Sequence
  Description of Artificial Sequence: Synthetic whey; inner sequence
ggacgcagcttgcctactggtggtcacg

SEQ ID NO: 44340 - DNA, 30 bp, Artificial Sequence; identical to SEQ ID NO: 16389
  Description of Artificial Sequence: Synthetic whey; inner sequence

SEQ ID NO: 44341 - DNA, 30 bp, Artificial Sequence; identical to SEQ ID NO: 274
  Description of Artificial Sequence: Synthetic whey; inner sequence

SEQ ID NO: 44342 - DNA, 30 bp, Artificial Sequence; identical to SEQ ID NO: 28674
  Description of Artificial Sequence: Synthetic whey; inner sequence

SEQ ID NO: 44343 - DNA, 30 bp, Artificial Sequence; identical to SEQ ID NO: 4543
  Description of Artificial Sequence: Synthetic whey; inner sequence

SEQ ID NO: 44344 - DNA, 30 bp, Artificial Sequence
  Description of Artificial Sequence: Synthetic whey; inner sequence
catgccacgtgatgctgtcattccgtcacg

SEQ ID NO: 44345 - DNA, 30 bp, Artificial Sequence
  Description of Artificial Sequence: Synthetic whey; inner sequence
ggacgccacgtaccgtatcgtggccatgtg

SEQ ID NO: 44346 - DNA, 30 bp, Artificial Sequence; identical to SEQ ID NO: 4419
  Description of Artificial Sequence: Synthetic whey; inner sequence

SEQ ID NO: 44347 - DNA, 30 bp, Artificial Sequence; identical to SEQ ID NO: 20496
  Description of Artificial Sequence: Synthetic whey; inner sequence

SEQ ID NO: 44348 - DNA, 30 bp, Artificial Sequence
  Description of Artificial Sequence: Synthetic whey; inner sequence
acgttgcgcagtacgtgtggacgtgatgca

SEQ ID NO: 44349 - DNA, 30 bp, Artificial Sequence; identical to SEQ ID NO: 647
  Description of Artificial Sequence: Synthetic whey; inner sequence

SEQ ID NO: 44350 - DNA, 30 bp, Artificial Sequence; identical to SEQ ID NO: 787
  Description of Artificial Sequence: Synthetic whey; inner sequence

SEQ ID NO: 44351 - DNA, 30 bp, Artificial Sequence
  Description of Artificial Sequence: Synthetic whey; inner sequence
ccatctcgtcactatcatgtgtgtcacgta

SEQ ID NO: 44352 - DNA, 30 bp, Artificial Sequence; identical to SEQ ID NO: 289
  Description of Artificial Sequence: Synthetic whey; inner sequence

SEQ ID NO: 44353 - DNA, 30 bp, Artificial Sequence; identical to SEQ ID NO: 28747
  Description of Artificial Sequence: Synthetic whey; inner sequence

SEQ ID NO: 44354 - DNA, 30 bp, Artificial Sequence; identical to SEQ ID NO: 21001
  Description of Artificial Sequence: Synthetic whey; inner sequence

SEQ ID NO: 44355 - DNA, 30 bp, Artificial Sequence; identical to SEQ ID NO: 20458
  Description of Artificial Sequence: Synthetic whey; inner sequence

SEQ ID NO: 44356 - DNA, 30 bp, Artificial Sequence; identical to SEQ ID NO: 294
  Description of Artificial Sequence: Synthetic whey; inner sequence

SEQ ID NO: 44357 - DNA, 30 bp, Artificial Sequence; identical to SEQ ID NO: 8964
  Description of Artificial Sequence: Synthetic whey; inner sequence

SEQ ID NO: 44358 - DNA, 30 bp, Artificial Sequence; identical to SEQ ID NO: 20730
  Description of Artificial Sequence: Synthetic whey; inner sequence

SEQ ID NO: 44359 - DNA, 30 bp, Artificial Sequence; identical to SEQ ID NO: 4603
  Description of Artificial Sequence: Synthetic whey; inner sequence

SEQ ID NO: 44360 - DNA, 30 bp, Artificial Sequence; identical to SEQ ID NO: 4429
  Description of Artificial Sequence: Synthetic whey; inner sequence

SEQ ID NO: 44361 - DNA, 30 bp, Artificial Sequence; identical to SEQ ID NO: 857
  Description of Artificial Sequence: Synthetic whey; inner sequence

SEQ ID NO: 44362 - DNA, 30 bp, Artificial Sequence; identical to SEQ ID NO: 12892
  Description of Artificial Sequence: Synthetic whey; inner sequence

SEQ ID NO: 44363 - DNA, 30 bp, Artificial Sequence; identical to SEQ ID NO: 789
  Description of Artificial Sequence: Synthetic whey; inner sequence

SEQ ID NO: 44364 - DNA, 30 bp, Artificial Sequence; identical to SEQ ID NO: 4627
  Description of Artificial Sequence: Synthetic whey; inner sequence

SEQ ID NO: 44365 - DNA, 30 bp, Artificial Sequence; identical to SEQ ID NO: 74
  Description of Artificial Sequence: Synthetic whey; inner sequence

SEQ ID NO: 44366 - DNA, 30 bp, Artificial Sequence; identical to SEQ ID NO: 186
  Description of Artificial Sequence: Synthetic whey; inner sequence

SEQ ID NO: 44367 - DNA, 30 bp, Artificial Sequence
  Description of Artificial Sequence: Synthetic whey; inner sequence
gtcactgtgcctgaccgtcaagtttcggca

SEQ ID NO: 44368 - DNA, 30 bp, Artificial Sequence; identical to SEQ ID NO: 183
  Description of Artificial Sequence: Synthetic whey; inner sequence

SEQ ID NO: 44369 - DNA, 30 bp, Artificial Sequence; identical to SEQ ID NO: 32619
  Description of Artificial Sequence: Synthetic whey; inner sequence

SEQ ID NO: 44370 - DNA, 30 bp, Artificial Sequence
  Description of Artificial Sequence: Synthetic whey; inner sequence
gtcactgttcctgaccgtcaagttgcggca

SEQ ID NO: 44371 - DNA, 30 bp, Artificial Sequence; identical to SEQ ID NO: 28957
  Description of Artificial Sequence: Synthetic whey; inner sequence

SEQ ID NO: 44372 - DNA, 30 bp, Artificial Sequence
  Description of Artificial Sequence: Synthetic whey; inner sequence
catggcaacgtgatgcgtgtgacctgcaca

SEQ ID NO: 44373 - DNA, 30 bp, Artificial Sequence; identical to SEQ ID NO: 28869
  Description of Artificial Sequence: Synthetic whey; inner sequence

SEQ ID NO: 44374 - DNA, 30 bp, Artificial Sequence; identical to SEQ ID NO: 4890
  Description of Artificial Sequence: Synthetic whey; inner sequence

SEQ ID NO: 44375 - DNA, 30 bp, Artificial Sequence; identical to SEQ ID NO: 4743
  Description of Artificial Sequence: Synthetic whey; inner sequence

SEQ ID NO: 44376 - DNA, 30 bp, Artificial Sequence; identical to SEQ ID NO: 521
  Description of Artificial Sequence: Synthetic whey; inner sequence

SEQ ID NO: 44377 - DNA, 30 bp, Artificial Sequence; identical to SEQ ID NO: 28720
  Description of Artificial Sequence: Synthetic whey; inner sequence

SEQ ID NO: 44378 - DNA, 30 bp, Artificial Sequence; identical to SEQ ID NO: 20811
  Description of Artificial Sequence: Synthetic whey; inner sequence

SEQ ID NO: 44379 - DNA, 30 bp, Artificial Sequence
  Description of Artificial Sequence: Synthetic whey; inner sequence
cgatgcacacgatgatgcacgtccttcggc

SEQ ID NO: 44380 - DNA, 30 bp, Artificial Sequence; identical to SEQ ID NO: 203
  Description of Artificial Sequence: Synthetic whey; inner sequence

SEQ ID NO: 44381 - DNA, 25 bp, Artificial Sequence
  Description of Artificial Sequence: Synthetic whey; inner sequence
gtcattccgcatcctacacgtgggc

SEQ ID NO: 44382 - DNA, 30 bp, Artificial Sequence; identical to SEQ ID NO: 805
  Description of Artificial Sequence: Synthetic whey; inner sequence

SEQ ID NO: 44383 - DNA, 30 bp, Artificial Sequence; identical to SEQ ID NO: 447
  Description of Artificial Sequence: Synthetic whey; inner sequence

SEQ ID NO: 44384 - DNA, 30 bp, Artificial Sequence; identical to SEQ ID NO: 28416
  Description of Artificial Sequence: Synthetic whey; inner sequence

SEQ ID NO: 44385 - DNA, 30 bp, Artificial Sequence
  Description of Artificial Sequence: Synthetic whey; inner sequence
cacgacgtgacgtatcgctacatgcacacg

SEQ ID NO: 44386 - DNA, 30 bp, Artificial Sequence; identical to SEQ ID NO: 4787
  Description of Artificial Sequence: Synthetic whey; inner sequence

SEQ ID NO: 44387 - DNA, 30 bp, Artificial Sequence; identical to SEQ ID NO: 12958
  Description of Artificial Sequence: Synthetic whey; inner sequence

SEQ ID NO: 44388 - DNA, 30 bp, Artificial Sequence
  Description of Artificial Sequence: Synthetic whey; inner sequence
cgatgcagatcgatgtcgttacgctgcacg

SEQ ID NO: 44389 - DNA, 30 bp, Artificial Sequence
  Description of Artificial Sequence: Synthetic whey; inner sequence
gtcactgtgcctgaccgtcaagttgaggca

SEQ ID NO: 44390 - DNA, 30 bp, Artificial Sequence; identical to SEQ ID NO: 326
  Description of Artificial Sequence: Synthetic whey; inner sequence

SEQ ID NO: 44391 - DNA, 30 bp, Artificial Sequence
  Description of Artificial Sequence: Synthetic whey; inner sequence
ggccgcaacgtaccgtatcgtggccatgta

SEQ ID NO: 44392 - DNA, 30 bp, Artificial Sequence; identical to SEQ ID NO: 28316
  Description of Artificial Sequence: Synthetic whey; inner sequence

SEQ ID NO: 44393 - DNA, 30 bp, Artificial Sequence; identical to SEQ ID NO: 4653
  Description of Artificial Sequence: Synthetic whey; inner sequence

SEQ ID NO: 44394 - DNA, 30 bp, Artificial Sequence; identical to SEQ ID NO: 20696
  Description of Artificial Sequence: Synthetic whey; inner sequence

SEQ ID NO: 44395 - DNA, 30 bp, Artificial Sequence; identical to SEQ ID NO: 634
  Description of Artificial Sequence: Synthetic whey; inner sequence

SEQ ID NO: 44396 - DNA, 30 bp, Artificial Sequence; identical to SEQ ID NO: 20722
  Description of Artificial Sequence: Synthetic whey; inner sequence

SEQ ID NO: 44397 - DNA, 30 bp, Artificial Sequence; identical to SEQ ID NO: 706
  Description of Artificial Sequence: Synthetic whey; inner sequence

SEQ ID NO: 44398 - DNA, 30 bp, Artificial Sequence; identical to SEQ ID NO: 4955
  Description of Artificial Sequence: Synthetic whey; inner sequence

SEQ ID NO: 44399 - DNA, 30 bp, Artificial Sequence
  Description of Artificial Sequence: Synthetic whey; inner sequence
gtcatgccctcccttcgagtgtgacaggta

SEQ ID NO: 44400 - DNA, 30 bp, Artificial Sequence; identical to SEQ ID NO: 28329
  Description of Artificial Sequence: Synthetic whey; inner sequence

SEQ ID NO: 44401 - DNA, 30 bp, Artificial Sequence; identical to SEQ ID NO: 351
  Description of Artificial Sequence: Synthetic whey; inner sequence

SEQ ID NO: 44402 - DNA, 30 bp, Artificial Sequence
  Description of Artificial Sequence: Synthetic whey; inner sequence
gtactcatcgtcccgtcatgtggttccgta

SEQ ID NO: 44403 - DNA, 30 bp, Artificial Sequence; identical to SEQ ID NO: 8872
  Description of Artificial Sequence: Synthetic whey; inner sequence

SEQ ID NO: 44404 - DNA, 30 bp, Artificial Sequence; identical to SEQ ID NO: 132
  Description of Artificial Sequence: Synthetic whey; inner sequence

SEQ ID NO: 44405 - DNA, 30 bp, Artificial Sequence; identical to SEQ ID NO: 20662
  Description of Artificial Sequence: Synthetic whey; inner sequence

SEQ ID NO: 44406 - DNA, 30 bp, Artificial Sequence
  Description of Artificial Sequence: Synthetic whey; inner sequence
gtaatgccatcccttcgagtgtgacaggta

SEQ ID NO: 44407 - DNA, 30 bp, Artificial Sequence; identical to SEQ ID NO: 28884
  Description of Artificial Sequence: Synthetic whey; inner sequence

SEQ ID NO: 44408 - DNA, 30 bp, Artificial Sequence; identical to SEQ ID NO: 4621
  Description of Artificial Sequence: Synthetic whey; inner sequence

SEQ ID NO: 44409 - DNA, 30 bp, Artificial Sequence; identical to SEQ ID NO: 56
  Description of Artificial Sequence: Synthetic whey; inner sequence

SEQ ID NO: 44410 - DNA, 30 bp, Artificial Sequence; identical to SEQ ID NO: 4748
  Description of Artificial Sequence: Synthetic whey; inner sequence

SEQ ID NO: 44411 - DNA, 30 bp, Artificial Sequence; identical to SEQ ID NO: 16906
  Description of Artificial Sequence: Synthetic whey; inner sequence

SEQ ID NO: 44412 - DNA, 30 bp, Artificial Sequence
  Description of Artificial Sequence: Synthetic whey; inner sequence
gtacgcaacgtaccgtatcgtggccatgta

SEQ ID NO: 44413 - DNA, 30 bp, Artificial Sequence; identical to SEQ ID NO: 256
  Description of Artificial Sequence: Synthetic whey; inner sequence

SEQ ID NO: 44414 - DNA, 30 bp, Artificial Sequence; identical to SEQ ID NO: 591
  Description of Artificial Sequence: Synthetic whey; inner sequence

SEQ ID NO: 44415 - DNA, 30 bp, Artificial Sequence; identical to SEQ ID NO: 20613
  Description of Artificial Sequence: Synthetic whey; inner sequence

SEQ ID NO: 44416 - DNA, 30 bp, Artificial Sequence; identical to SEQ ID NO: 20752
  Description of Artificial Sequence: Synthetic whey; inner sequence

SEQ ID NO: 44417 - DNA, 30 bp, Artificial Sequence; identical to SEQ ID NO: 20530
  Description of Artificial Sequence: Synthetic whey; inner sequence

SEQ ID NO: 44418 - DNA, 30 bp, Artificial Sequence; identical to SEQ ID NO: 16698
  Description of Artificial Sequence: Synthetic whey; inner sequence

SEQ ID NO: 44419 - DNA, 30 bp, Artificial Sequence; identical to SEQ ID NO: 28909
  Description of Artificial Sequence: Synthetic whey; inner sequence

SEQ ID NO: 44420 - DNA, 30 bp, Artificial Sequence; identical to SEQ ID NO: 4469
  Description of Artificial Sequence: Synthetic whey; inner sequence

SEQ ID NO: 44421 - DNA, 30 bp, Artificial Sequence; identical to SEQ ID NO: 114
  Description of Artificial Sequence: Synthetic whey; inner sequence

SEQ ID NO: 44422 - DNA, 30 bp, Artificial Sequence
  Description of Artificial Sequence: Synthetic whey; inner sequence
gtcactgtgcctgatcgtcaagttgcggca

SEQ ID NO: 44423 - DNA, 30 bp, Artificial Sequence; identical to SEQ ID NO: 160
  Description of Artificial Sequence: Synthetic whey; inner sequence

SEQ ID NO: 44424 - DNA, 30 bp, Artificial Sequence; identical to SEQ ID NO: 4987
  Description of Artificial Sequence: Synthetic whey; inner sequence

SEQ ID NO: 44425 - DNA, 30 bp, Artificial Sequence
  Description of Artificial Sequence: Synthetic whey; inner sequence
acgtgcaacgtcacgtgctgcgtcgtcacc

SEQ ID NO: 44426 - DNA, 30 bp, Artificial Sequence
  Description of Artificial Sequence: Synthetic whey; inner sequence
cgtgacacgcgagccatgcgtacgtacgcg

SEQ ID NO: 44427 - DNA, 30 bp, Artificial Sequence; identical to SEQ ID NO: 255
  Description of Artificial Sequence: Synthetic whey; inner sequence

SEQ ID NO: 44428 - DNA, 30 bp, Artificial Sequence; identical to SEQ ID NO: 4620
  Description of Artificial Sequence: Synthetic whey; inner sequence

SEQ ID NO: 44429 - DNA, 30 bp, Artificial Sequence; identical to SEQ ID NO: 4579
  Description of Artificial Sequence: Synthetic whey; inner sequence

SEQ ID NO: 44430 - DNA, 30 bp, Artificial Sequence
  Description of Artificial Sequence: Synthetic whey; inner sequence
gtacgcatcgccccgtcatgtggttccgta

SEQ ID NO: 44431 - DNA, 30 bp, Artificial Sequence; identical to SEQ ID NO: 32384
  Description of Artificial Sequence: Synthetic whey; inner sequence

SEQ ID NO: 44432 - DNA, 30 bp, Artificial Sequence
  Description of Artificial Sequence: Synthetic whey; inner sequence
tggtcaacgcgcatacgtcacgattgcatg

SEQ ID NO: 44433 - DNA, 30 bp, Artificial Sequence; identical to SEQ ID NO: 246
  Description of Artificial Sequence: Synthetic whey; inner sequence

SEQ ID NO: 44434 - DNA, 30 bp, Artificial Sequence; identical to SEQ ID NO: 8985
  Description of Artificial Sequence: Synthetic whey; inner sequence

SEQ ID NO: 44435 - DNA, 29 bp, Artificial Sequence
  Description of Artificial Sequence: Synthetic whey; inner sequence
gtcattccgcatcctacacgtggtgcatg

SEQ ID NO: 44436 - DNA, 30 bp, Artificial Sequence; identical to SEQ ID NO: 4988
  Description of Artificial Sequence: Synthetic whey; inner sequence

SEQ ID NO: 44437 - DNA, 30 bp, Artificial Sequence; identical to SEQ ID NO: 519
  Description of Artificial Sequence: Synthetic whey; inner sequence

SEQ ID NO: 44438 - DNA, 30 bp, Artificial Sequence; identical to SEQ ID NO: 4485
  Description of Artificial Sequence: Synthetic whey; inner sequence

SEQ ID NO: 44439 - DNA, 30 bp, Artificial Sequence
  Description of Artificial Sequence: Synthetic whey; inner sequence
ggacgcaacgtaccgtatcgtggccctgtg

SEQ ID NO: 44440 - DNA, 30 bp, Artificial Sequence; identical to SEQ ID NO: 28978
  Description of Artificial Sequence: Synthetic whey; inner sequence

SEQ ID NO: 44441 - DNA, 30 bp, Artificial Sequence; identical to SEQ ID NO: 28432
  Description of Artificial Sequence: Synthetic whey; inner sequence

SEQ ID NO: 44442 - DNA, 30 bp, Artificial Sequence; identical to SEQ ID NO: 104
  Description of Artificial Sequence: Synthetic whey; inner sequence

SEQ ID NO: 44443 - DNA, 30 bp, Artificial Sequence; identical to SEQ ID NO: 16744
  Description of Artificial Sequence: Synthetic whey; inner sequence

SEQ ID NO: 44444 - DNA, 30 bp, Artificial Sequence
  Description of Artificial Sequence: Synthetic whey; inner sequence
gtcactgtgcctgaccgtcatgttgcggca

SEQ ID NO: 44445 - DNA, 30 bp, Artificial Sequence; identical to SEQ ID NO: 12743
  Description of Artificial Sequence: Synthetic whey; inner sequence

SEQ ID NO: 44446 - DNA, 30 bp, Artificial Sequence
  Description of Artificial Sequence: Synthetic whey; inner sequence
cgtaccagtacgcaacacgtcatcgtcacg

SEQ ID NO: 44447 - DNA, 30 bp, Artificial Sequence; identical to SEQ ID NO: 36514
  Description of Artificial Sequence: Synthetic whey; inner sequence

SEQ ID NO: 44448 - DNA, 30 bp, Artificial Sequence; identical to SEQ ID NO: 28960
  Description of Artificial Sequence: Synthetic whey; inner sequence

SEQ ID NO: 44449 - DNA, 30 bp, Artificial Sequence; identical to SEQ ID NO: 16664
  Description of Artificial Sequence: Synthetic whey; inner sequence

SEQ ID NO: 44450 - DNA, 30 bp, Artificial Sequence; identical to SEQ ID NO: 28751
  Description of Artificial Sequence: Synthetic whey; inner sequence

SEQ ID NO: 44451 - DNA, 30 bp, Artificial Sequence; identical to SEQ ID NO: 367
  Description of Artificial Sequence: Synthetic whey; inner sequence

SEQ ID NO: 44452 - DNA, 32 bp, Artificial Sequence
  Description of Artificial Sequence: Synthetic whey; inner sequence
ggacgcaacgtaccgtatcgtggccatgcaca

SEQ ID NO: 44453 - DNA, 30 bp, Artificial Sequence; identical to SEQ ID NO: 20324
  Description of Artificial Sequence: Synthetic whey; inner sequence

SEQ ID NO: 44454 - DNA, 30 bp, Artificial Sequence
  Description of Artificial Sequence: Synthetic whey; inner sequence
gtcactgtgcctgaccgtcaagttgctgca

SEQ ID NO: 44455 - DNA, 30 bp, Artificial Sequence; identical to SEQ ID NO: 20335
  Description of Artificial Sequence: Synthetic whey; inner sequence

SEQ ID NO: 44456 - DNA, 30 bp, Artificial Sequence; identical to SEQ ID NO: 4612
  Description of Artificial Sequence: Synthetic whey; inner sequence

SEQ ID NO: 44457 - DNA, 30 bp, Artificial Sequence; identical to SEQ ID NO: 724
  Description of Artificial Sequence: Synthetic whey; inner sequence

SEQ ID NO: 44458 - DNA, 30 bp, Artificial Sequence; identical to SEQ ID NO: 920
  Description of Artificial Sequence: Synthetic whey; inner sequence

SEQ ID NO: 44459 - DNA, 30 bp, Artificial Sequence; identical to SEQ ID NO: 215
  Description of Artificial Sequence: Synthetic whey; inner sequence

SEQ ID NO: 44460 - DNA, 30 bp, Artificial Sequence; identical to SEQ ID NO: 28814
  Description of Artificial Sequence: Synthetic whey; inner sequence

SEQ ID NO: 44461 - DNA, 30 bp, Artificial Sequence
  Description of Artificial Sequence: Synthetic whey; inner sequence
cgtaccacacgttacggcatgtgcttcgca

SEQ ID NO: 44462 - DNA, 30 bp, Artificial Sequence
  Description of Artificial Sequence: Synthetic whey; inner sequence
gtcatgccataccttcgagtgtgacaggta

SEQ ID NO: 44463 - DNA, 30 bp, Artificial Sequence; identical to SEQ ID NO: 152
  Description of Artificial Sequence: Synthetic whey; inner sequence

SEQ ID NO: 44464 - DNA, 30 bp, Artificial Sequence; identical to SEQ ID NO: 16985
  Description of Artificial Sequence: Synthetic whey; inner sequence

SEQ ID NO: 44465 - DNA, 30 bp, Artificial Sequence
  Description of Artificial Sequence: Synthetic whey; inner sequence
cgtaccgcacgtgacgtgtccgtgccgtga

SEQ ID NO: 44466 - DNA, 30 bp, Artificial Sequence
  Description of Artificial Sequence: Synthetic whey; inner sequence
ttcatgccatcccttcgagtgtgacaggta

SEQ ID NO: 44467 - DNA, 30 bp, Artificial Sequence; identical to SEQ ID NO: 20683
  Description of Artificial Sequence: Synthetic whey; inner sequence

SEQ ID NO: 44468 - DNA, 30 bp, Artificial Sequence; identical to SEQ ID NO: 4571
  Description of Artificial Sequence: Synthetic whey; inner sequence

SEQ ID NO: 44469 - DNA, 30 bp, Artificial Sequence; identical to SEQ ID NO: 143
  Description of Artificial Sequence: Synthetic whey; inner sequence

SEQ ID NO: 44470 - DNA, 30 bp, Artificial Sequence
  Description of Artificial Sequence: Synthetic whey; inner sequence
gcactgaacgcaccctatcatgtaggcatg

SEQ ID NO: 44471 - DNA, 30 bp, Artificial Sequence; identical to SEQ ID NO: 34
  Description of Artificial Sequence: Synthetic whey; inner sequence

SEQ ID NO: 44472 - DNA, 30 bp, Artificial Sequence
  Description of Artificial Sequence: Synthetic whey; inner sequence
ggacgcaacgtaccgtatcgtggccatgtt

SEQ ID NO: 44473 - DNA, 30 bp, Artificial Sequence
  Description of Artificial Sequence: Synthetic whey; inner sequence
gtcatgacatcccttcgagtgtgacaggta

SEQ ID NO: 44474 - DNA, 30 bp, Artificial Sequence; identical to SEQ ID NO: 20737
  Description of Artificial Sequence: Synthetic whey; inner sequence

SEQ ID NO: 44475 - DNA, 30 bp, Artificial Sequence; identical to SEQ ID NO: 24852
  Description of Artificial Sequence: Synthetic whey; inner sequence

SEQ ID NO: 44476 - DNA, 30 bp, Artificial Sequence; identical to SEQ ID NO: 12985
  Description of Artificial Sequence: Synthetic whey; inner sequence

SEQ ID NO: 44477 - DNA, 30 bp, Artificial Sequence; identical to SEQ ID NO: 630
  Description of Artificial Sequence: Synthetic whey; inner sequence

SEQ ID NO: 44478 - DNA, 30 bp, Artificial Sequence; identical to SEQ ID NO: 8798
  Description of Artificial Sequence: Synthetic whey; inner sequence

SEQ ID NO: 44479 - DNA, 30 bp, Artificial Sequence
  Description of Artificial Sequence: Synthetic whey; inner sequence
cgtacgacacggatacgtcctgtctgcacg

SEQ ID NO: 44480 - DNA, 30 bp, Artificial Sequence; identical to SEQ ID NO: 321
  Description of Artificial Sequence: Synthetic whey; inner sequence

SEQ ID NO: 44481 - DNA, 30 bp, Artificial Sequence; identical to SEQ ID NO: 20801
  Description of Artificial Sequence: Synthetic whey; inner sequence

SEQ ID NO: 44482 - DNA, 30 bp, Artificial Sequence; identical to SEQ ID NO: 137
  Description of Artificial Sequence: Synthetic whey; inner sequence

SEQ ID NO: 44483 - DNA, 30 bp, Artificial Sequence; identical to SEQ ID NO: 553
  Description of Artificial Sequence: Synthetic whey; inner sequence

SEQ ID NO: 44484 - DNA, 30 bp, Artificial Sequence
  Description of Artificial Sequence: Synthetic whey; inner sequence
gtacgcatcgtcccgtcatgtggatccgta

SEQ ID NO: 44485 - DNA, 30 bp, Artificial Sequence; identical to SEQ ID NO: 20776
  Description of Artificial Sequence: Synthetic whey; inner sequence

SEQ ID NO: 44486 - DNA, 30 bp, Artificial Sequence; identical to SEQ ID NO: 20903
  Description of Artificial Sequence: Synthetic whey; inner sequence

SEQ ID NO: 44487 - DNA, 30 bp, Artificial Sequence
  Description of Artificial Sequence: Synthetic whey; inner sequence
ttcattccgcatcctacacgtgggcacgta

SEQ ID NO: 44488 - DNA, 30 bp, Artificial Sequence; identical to SEQ ID NO: 88
  Description of Artificial Sequence: Synthetic whey; inner sequence

SEQ ID NO: 44489 - DNA, 30 bp, Artificial Sequence; identical to SEQ ID NO: 20982
  Description of Artificial Sequence: Synthetic whey; inner sequence

SEQ ID NO: 44490 - DNA, 30 bp, Artificial Sequence
  Description of Artificial Sequence: Synthetic whey; inner sequence
ggactcaacgtaccgtatcgtggccatgtg

SEQ ID NO: 44491 - DNA, 30 bp, Artificial Sequence; identical to SEQ ID NO: 20746
  Description of Artificial Sequence: Synthetic whey; inner sequence

SEQ ID NO: 44492 - DNA, 30 bp, Artificial Sequence; identical to SEQ ID NO: 282
  Description of Artificial Sequence: Synthetic whey; inner sequence

SEQ ID NO: 44493 - DNA, 30 bp, Artificial Sequence
  Description of Artificial Sequence: Synthetic whey; inner sequence
cgtgcagcacgtacattgcgtcacgttggc

SEQ ID NO: 44494 - DNA, 30 bp, Artificial Sequence; identical to SEQ ID NO: 16948
  Description of Artificial Sequence: Synthetic whey; inner sequence

SEQ ID NO: 44495 - DNA, 30 bp, Artificial Sequence; identical to SEQ ID NO: 20519
  Description of Artificial Sequence: Synthetic whey; inner sequence

SEQ ID NO: 44496 - DNA, 30 bp, Artificial Sequence; identical to SEQ ID NO: 493
  Description of Artificial Sequence: Synthetic whey; inner sequence

SEQ ID NO: 44497 - DNA, 30 bp, Artificial Sequence
  Description of Artificial Sequence: Synthetic whey; inner sequence
gtacgcatcgtcccgtcatgtggttcagta

SEQ ID NO: 44498 - DNA, 30 bp, Artificial Sequence; identical to SEQ ID NO: 20869
  Description of Artificial Sequence: Synthetic whey; inner sequence

SEQ ID NO: 44499 - DNA, 30 bp, Artificial Sequence
  Description of Artificial Sequence: Synthetic whey; inner sequence
acgtcaaaacgcagtgcatcacgttgcgca

SEQ ID NO: 44500 - DNA, 30 bp, Artificial Sequence
  Description of Artificial Sequence: Synthetic whey; inner sequence
gtcatgccatcccttcgagtgtgaccggta

SEQ ID NO: 44501 - DNA, 30 bp, Artificial Sequence; identical to SEQ ID NO: 5001
  Description of Artificial Sequence: Synthetic whey; inner sequence

SEQ ID NO: 44502 - DNA, 30 bp, Artificial Sequence; identical to SEQ ID NO: 551
  Description of Artificial Sequence: Synthetic whey; inner sequence

SEQ ID NO: 44503 - DNA, 30 bp, Artificial Sequence; identical to SEQ ID NO: 32190
  Description of Artificial Sequence: Synthetic whey; inner sequence

SEQ ID NO: 44504 - DNA, 30 bp, Artificial Sequence; identical to SEQ ID NO: 28874
  Description of Artificial Sequence: Synthetic whey; inner sequence

SEQ ID NO: 44505 - DNA, 30 bp, Artificial Sequence; identical to SEQ ID NO: 20269
  Description of Artificial Sequence: Synthetic whey; inner sequence

SEQ ID NO: 44506 - DNA, 30 bp, Artificial Sequence; identical to SEQ ID NO: 28860
  Description of Artificial Sequence: Synthetic whey; inner sequence

SEQ ID NO: 44507 - DNA, 30 bp, Artificial Sequence
  Description of Artificial Sequence: Synthetic whey; inner sequence
ggacgactcgcaccctatcatgtaggcatg

SEQ ID NO: 44508 - DNA, 30 bp, Artificial Sequence; identical to SEQ ID NO: 324
  Description of Artificial Sequence: Synthetic whey; inner sequence

SEQ ID NO: 44509 - DNA, 30 bp, Artificial Sequence
  Description of Artificial Sequence: Synthetic whey; inner sequence
cgtgacgtaacggcaaggtgaccatgcaca

SEQ ID NO: 44510 - DNA, 30 bp, Artificial Sequence; identical to SEQ ID NO: 580
  Description of Artificial Sequence: Synthetic whey; inner sequence

SEQ ID NO: 44511 - DNA, 30 bp, Artificial Sequence
  Description of Artificial Sequence: Synthetic whey; inner sequence
gtcatgccatcccttctagtgtgacaggta

SEQ ID NO: 44512 - DNA, 30 bp, Artificial Sequence; identical to SEQ ID NO: 868
  Description of Artificial Sequence: Synthetic whey; inner sequence

SEQ ID NO: 44513 - DNA, 30 bp, Artificial Sequence; identical to SEQ ID NO: 20286
  Description of Artificial Sequence: Synthetic whey; inner sequence

SEQ ID NO: 44514 - DNA, 30 bp, Artificial Sequence; identical to SEQ ID NO: 28780
  Description of Artificial Sequence: Synthetic whey; inner sequence

SEQ ID NO: 44515 - DNA, 30 bp, Artificial Sequence; identical to SEQ ID NO: 4918
  Description of Artificial Sequence: Synthetic whey; inner sequence

SEQ ID NO: 44516 - DNA, 30 bp, Artificial Sequence; identical to SEQ ID NO: 16265
  Description of Artificial Sequence: Synthetic whey; inner sequence

SEQ ID NO: 44517 - DNA, 30 bp, Artificial Sequence; identical to SEQ ID NO: 945
  Description of Artificial Sequence: Synthetic whey; inner sequence

SEQ ID NO: 44518 - DNA, 30 bp, Artificial Sequence; identical to SEQ ID NO: 8938
  Description of Artificial Sequence: Synthetic whey; inner sequence

SEQ ID NO: 44519 - DNA, 30 bp, Artificial Sequence; identical to SEQ ID NO: 12659
  Description of Artificial Sequence: Synthetic whey; inner sequence

SEQ ID NO: 44520 - DNA, 30 bp, Artificial Sequence; identical to SEQ ID NO: 4997
  Description of Artificial Sequence: Synthetic whey; inner sequence

SEQ ID NO: 44521 - DNA, 30 bp, Artificial Sequence
  Description of Artificial Sequence: Synthetic whey; inner sequence
gtcatgccatcccttcgagtgttacaggta

SEQ ID NO: 44522 - DNA, 30 bp, Artificial Sequence; identical to SEQ ID NO: 20229
  Description of Artificial Sequence: Synthetic whey; inner sequence

SEQ ID NO: 44523 - DNA, 30 bp, Artificial Sequence; identical to SEQ ID NO: 20784
  Description of Artificial Sequence: Synthetic whey; inner sequence

SEQ ID NO: 44524 - DNA, 30 bp, Artificial Sequence
  Description of Artificial Sequence: Synthetic whey; inner sequence
acgtcaacatggcgcggttcgtaacgcaca

SEQ ID NO: 44525 - DNA, 30 bp, Artificial Sequence; identical to SEQ ID NO: 173
  Description of Artificial Sequence: Synthetic whey; inner sequence

SEQ ID NO: 44526 - DNA, 30 bp, Artificial Sequence; identical to SEQ ID NO: 140
  Description of Artificial Sequence: Synthetic whey; inner sequence

SEQ ID NO: 44527 - DNA, 30 bp, Artificial Sequence
  Description of Artificial Sequence: Synthetic whey; inner sequence
gcacttcacgcaccctatcatgtaggcatg

SEQ ID NO: 44528 - DNA, 26 bp, Artificial Sequence
  Description of Artificial Sequence: Synthetic whey; inner sequence
ggcatgcacgcacctacacgtggaca

SEQ ID NO: 44529 - DNA, 30 bp, Artificial Sequence; identical to SEQ ID NO: 4420
  Description of Artificial Sequence: Synthetic whey; inner sequence

SEQ ID NO: 44530 - DNA, 30 bp, Artificial Sequence; identical to SEQ ID NO: 5002
  Description of Artificial Sequence: Synthetic whey; inner sequence

SEQ ID NO: 44531 - DNA, 30 bp, Artificial Sequence
  Description of Artificial Sequence: Synthetic whey; inner sequence
gtacgcatcgtcccgccatgtggttccgta

SEQ ID NO: 44532 - DNA, 30 bp, Artificial Sequence; identical to SEQ ID NO: 828
  Description of Artificial Sequence: Synthetic whey; inner sequence

SEQ ID NO: 44533 - DNA, 29 bp, Artificial Sequence
  Description of Artificial Sequence: Synthetic whey; inner sequence
cgatacggcatgatcgtacgtgctgctgc

SEQ ID NO: 44534 - DNA, 30 bp, Artificial Sequence; identical to SEQ ID NO: 20972
  Description of Artificial Sequence: Synthetic whey; inner sequence

SEQ ID NO: 44535 - DNA, 30 bp, Artificial Sequence; identical to SEQ ID NO: 20988
  Description of Artificial Sequence: Synthetic whey; inner sequence

SEQ ID NO: 44536 - DNA, 30 bp, Artificial Sequence; identical to SEQ ID NO: 36797
  Description of Artificial Sequence: Synthetic whey; inner sequence

SEQ ID NO: 44537 - DNA, 30 bp, Artificial Sequence; identical to SEQ ID NO: 16352
  Description of Artificial Sequence: Synthetic whey; inner sequence

SEQ ID NO: 44538 - DNA, 30 bp, Artificial Sequence; identical to SEQ ID NO: 105
  Description of Artificial Sequence: Synthetic whey; inner sequence

SEQ ID NO: 44539 - DNA, 30 bp, Artificial Sequence; identical to SEQ ID NO: 270
  Description of Artificial Sequence: Synthetic whey; inner sequence

SEQ ID NO: 44540 - DNA, 30 bp, Artificial Sequence; identical to SEQ ID NO: 42
  Description of Artificial Sequence: Synthetic whey; inner sequence

SEQ ID NO: 44541 - DNA, 30 bp, Artificial Sequence; identical to SEQ ID NO: 36768
  Description of Artificial Sequence: Synthetic whey; inner sequence

SEQ ID NO: 44542 - DNA, 30 bp, Artificial Sequence
  Description of Artificial Sequence: Synthetic whey; inner sequence
acgtcgcatgcgtaacgtacgtccatcgcg

SEQ ID NO: 44543 - DNA, 30 bp, Artificial Sequence; identical to SEQ ID NO: 106
  Description of Artificial Sequence: Synthetic whey; inner sequence

SEQ ID NO: 44544 - DNA, 30 bp, Artificial Sequence
  Description of Artificial Sequence: Synthetic whey; inner sequence
acgtcacacaacggtacgtatgcactgcgt

SEQ ID NO: 44545 - DNA, 30 bp, Artificial Sequence
  Description of Artificial Sequence: Synthetic whey; inner sequence
ccatagcgtcactatcatgtgtgtcacgta

SEQ ID NO: 44546 - DNA, 30 bp, Artificial Sequence; identical to SEQ ID NO: 16726
  Description of Artificial Sequence: Synthetic whey; inner sequence

SEQ ID NO: 44547 - DNA, 30 bp, Artificial Sequence
  Description of Artificial Sequence: Synthetic whey; inner sequence
gggcacagcgtacctcaacgtggacgtgca

SEQ ID NO: 44548 - DNA, 30 bp, Artificial Sequence; identical to SEQ ID NO: 28688
  Description of Artificial Sequence: Synthetic whey; inner sequence

SEQ ID NO: 44549 - DNA, 30 bp, Artificial Sequence
  Description of Artificial Sequence: Synthetic whey; inner sequence
cgtgacgtagcgaggcgtactgcatgcgcg

SEQ ID NO: 44550 - DNA, 30 bp, Artificial Sequence; identical to SEQ ID NO: 28582
  Description of Artificial Sequence: Synthetic whey; inner sequence

SEQ ID NO: 44551 - DNA, 30 bp, Artificial Sequence; identical to SEQ ID NO: 4707
  Description of Artificial Sequence: Synthetic whey; inner sequence

SEQ ID NO: 44552 - DNA, 30 bp, Artificial Sequence
  Description of Artificial Sequence: Synthetic whey; inner sequence
cgtgcacacgacaggatacgttgcgacacg

SEQ ID NO: 44553 - DNA, 30 bp, Artificial Sequence; identical to SEQ ID NO: 20817
  Description of Artificial Sequence: Synthetic whey; inner sequence

SEQ ID NO: 44554 - DNA, 30 bp, Artificial Sequence; identical to SEQ ID NO: 20880
  Description of Artificial Sequence: Synthetic whey; inner sequence

SEQ ID NO: 44555 - DNA, 30 bp, Artificial Sequence
  Description of Artificial Sequence: Synthetic whey; inner sequence
cgtacacactgacgacatacgtgctgcaca

SEQ ID NO: 44556 - DNA, 30 bp, Artificial Sequence
  Description of Artificial Sequence: Synthetic whey; inner sequence
gtcactgtgcctgaccgacaagttgcggca

SEQ ID NO: 44557 - DNA, 30 bp, Artificial Sequence; identical to SEQ ID NO: 28503
  Description of Artificial Sequence: Synthetic whey; inner sequence

SEQ ID NO: 44558 - DNA, 30 bp, Artificial Sequence; identical to SEQ ID NO: 20417
  Description of Artificial Sequence: Synthetic whey; inner sequence

SEQ ID NO: 44559 - DNA, 30 bp, Artificial Sequence; identical to SEQ ID NO: 20580
  Description of Artificial Sequence: Synthetic whey; inner sequence

SEQ ID NO: 44560 - DNA, 30 bp, Artificial Sequence
  Description of Artificial Sequence: Synthetic whey; inner sequence
tgcgtgtcgtacgcatacgtgtgctgcgtg

SEQ ID NO: 44561 - DNA, 30 bp, Artificial Sequence
  Description of Artificial Sequence: Synthetic whey; inner sequence
gtccgcatcgtcccgtcatgtggttccgta

SEQ ID NO: 44562 - DNA, 30 bp, Artificial Sequence; identical to SEQ ID NO: 20410
  Description of Artificial Sequence: Synthetic whey; inner sequence

SEQ ID NO: 44563 - DNA, 30 bp, Artificial Sequence; identical to SEQ ID NO: 559
  Description of Artificial Sequence: Synthetic whey; inner sequence

SEQ ID NO: 44564 - DNA, 30 bp, Artificial Sequence; identical to SEQ ID NO: 661
  Description of Artificial Sequence: Synthetic whey; inner sequence

SEQ ID NO: 44565 - DNA, 30 bp, Artificial Sequence
  Description of Artificial Sequence: Synthetic whey; inner sequence
gcacgcctcgcaccctatcatgtaggcatg

SEQ ID NO: 44566 - DNA, 30 bp, Artificial Sequence; identical to SEQ ID NO: 247
  Description of Artificial Sequence: Synthetic whey; inner sequence

SEQ ID NO: 44567 - DNA, 30 bp, Artificial Sequence; identical to SEQ ID NO: 4229
  Description of Artificial Sequence: Synthetic whey; inner sequence

SEQ ID NO: 44568 - DNA, 30 bp, Artificial Sequence; identical to SEQ ID NO: 236
  Description of Artificial Sequence: Synthetic whey; inner sequence

SEQ ID NO: 44569 - DNA, 30 bp, Artificial Sequence; identical to SEQ ID NO: 543
  Description of Artificial Sequence: Synthetic whey; inner sequence

SEQ ID NO: 44570 - DNA, 31 bp, Artificial Sequence; identical to SEQ ID NO: 250
  Description of Artificial Sequence: Synthetic whey; inner sequence

SEQ ID NO: 44571 - DNA, 30 bp, Artificial Sequence; identical to SEQ ID NO: 16950
  Description of Artificial Sequence: Synthetic whey; inner sequence

SEQ ID NO: 44572 - DNA, 30 bp, Artificial Sequence; identical to SEQ ID NO: 913
  Description of Artificial Sequence: Synthetic whey; inner sequence

SEQ ID NO: 44573 - DNA, 30 bp, Artificial Sequence; identical to SEQ ID NO: 4867
  Description of Artificial Sequence: Synthetic whey; inner sequence

SEQ ID NO: 44574 - DNA, 30 bp, Artificial Sequence; identical to SEQ ID NO: 28739
  Description of Artificial Sequence: Synthetic whey; inner sequence

SEQ ID NO: 44575 - DNA, 30 bp, Artificial Sequence; identical to SEQ ID NO: 20372
  Description of Artificial Sequence: Synthetic whey; inner sequence

SEQ ID NO: 44576 - DNA, 30 bp, Artificial Sequence; identical to SEQ ID NO: 28672
  Description of Artificial Sequence: Synthetic whey; inner sequence

SEQ ID NO: 44577 - DNA, 30 bp, Artificial Sequence
  Description of Artificial Sequence: Synthetic whey; inner sequence
cgagacaacgtgacgtgccgatgcgacgcg

SEQ ID NO: 44578 - DNA, 30 bp, Artificial Sequence; identical to SEQ ID NO: 139
  Description of Artificial Sequence: Synthetic whey; inner sequence

SEQ ID NO: 44579 - DNA, 30 bp, Artificial Sequence; identical to SEQ ID NO: 28914
  Description of Artificial Sequence: Synthetic whey; inner sequence

SEQ ID NO: 44580 - DNA, 30 bp, Artificial Sequence
  Description of Artificial Sequence: Synthetic whey; inner sequence
cgtgcgcatggcagcatacgtccgtacgcg

SEQ ID NO: 44581 - DNA, 30 bp, Artificial Sequence; identical to SEQ ID NO: 20979
  Description of Artificial Sequence: Synthetic whey; inner sequence

SEQ ID NO: 44582 - DNA, 30 bp, Artificial Sequence
  Description of Artificial Sequence: Synthetic whey; inner sequence
acgatgcggcacaacgtcacgtacgtagcg

SEQ ID NO: 44583 - DNA, 30 bp, Artificial Sequence
  Description of Artificial Sequence: Synthetic whey; inner sequence
ttcatgcacgaacactatcatggcggcatg

SEQ ID NO: 44584 - DNA, 30 bp, Artificial Sequence; identical to SEQ ID NO: 122
  Description of Artificial Sequence: Synthetic whey; inner sequence

SEQ ID NO: 44585 - DNA, 30 bp, Artificial Sequence; identical to SEQ ID NO: 28805
  Description of Artificial Sequence: Synthetic whey; inner sequence

SEQ ID NO: 44586 - DNA, 30 bp, Artificial Sequence; identical to SEQ ID NO: 124
  Description of Artificial Sequence: Synthetic whey; inner sequence

SEQ ID NO: 44587 - DNA, 30 bp, Artificial Sequence; identical to SEQ ID NO: 196
  Description of Artificial Sequence: Synthetic whey; inner sequence

SEQ ID NO: 44588 - DNA, 30 bp, Artificial Sequence; identical to SEQ ID NO: 287
  Description of Artificial Sequence: Synthetic whey; inner sequence

SEQ ID NO: 44589 - DNA, 30 bp, Artificial Sequence; identical to SEQ ID NO: 64
  Description of Artificial Sequence: Synthetic whey; inner sequence

SEQ ID NO: 44590 - DNA, 30 bp, Artificial Sequence; identical to SEQ ID NO: 16688
  Description of Artificial Sequence: Synthetic whey; inner sequence

SEQ ID NO: 44591 - DNA, 30 bp, Artificial Sequence; identical to SEQ ID NO: 32
  Description of Artificial Sequence: Synthetic whey; inner sequence

SEQ ID NO: 44592 - DNA, 30 bp, Artificial Sequence; identical to SEQ ID NO: 248
  Description of Artificial Sequence: Synthetic whey; inner sequence

SEQ ID NO: 44593 - DNA, 30 bp, Artificial Sequence; identical to SEQ ID NO: 154
  Description of Artificial Sequence: Synthetic whey; inner sequence

SEQ ID NO: 44594 - DNA, 30 bp, Artificial Sequence; identical to SEQ ID NO: 28806
  Description of Artificial Sequence: Synthetic whey; inner sequence

SEQ ID NO: 44595 - DNA, 30 bp, Artificial Sequence
  Description of Artificial Sequence: Synthetic whey; inner sequence
gtcactgtgcctgaccgccaagttgcggca

SEQ ID NO: 44596 - DNA, 30 bp, Artificial Sequence
  Description of Artificial Sequence: Synthetic whey; inner sequence
gtcattgtgcctgaccgtcaagttgcggca

SEQ ID NO: 44597 - DNA, 30 bp, Artificial Sequence
  Description of Artificial Sequence: Synthetic whey; inner sequence
ggacgcaacgtaccgcatcgtggccatgta

SEQ ID NO: 44598 - DNA, 30 bp, Artificial Sequence; identical to SEQ ID NO: 28959
  Description of Artificial Sequence: Synthetic whey; inner sequence

SEQ ID NO: 44599 - DNA, 30 bp, Artificial Sequence
  Description of Artificial Sequence: Synthetic whey; inner sequence
acgacggcacgacgtaagcatgacggtgtg

SEQ ID NO: 44600 - DNA, 30 bp, Artificial Sequence; identical to SEQ ID NO: 928
  Description of Artificial Sequence: Synthetic whey; inner sequence

SEQ ID NO: 44601 - DNA, 30 bp, Artificial Sequence; identical to SEQ ID NO: 420
  Description of Artificial Sequence: Synthetic whey; inner sequence

SEQ ID NO: 44602 - DNA, 30 bp, Artificial Sequence
  Description of Artificial Sequence: Synthetic whey; inner sequence
cgtgacaacgttgcgacatcatgctgcacg

SEQ ID NO: 44603 - DNA, 30 bp, Artificial Sequence; identical to SEQ ID NO: 8953
  Description of Artificial Sequence: Synthetic whey; inner sequence

SEQ ID NO: 44604 - DNA, 30 bp, Artificial Sequence; identical to SEQ ID NO: 20502
  Description of Artificial Sequence: Synthetic whey; inner sequence

SEQ ID NO: 44605 - DNA, 28 bp, Artificial Sequence
  Description of Artificial Sequence: Synthetic whey; inner sequence
ggcatgcacgcacctacacgtgatcatg

SEQ ID NO: 44606 - DNA, 30 bp, Artificial Sequence; identical to SEQ ID NO: 76
  Description of Artificial Sequence: Synthetic whey; inner sequence

SEQ ID NO: 44607 - DNA, 30 bp, Artificial Sequence; identical to SEQ ID NO: 28907
  Description of Artificial Sequence: Synthetic whey; inner sequence

SEQ ID NO: 44608 - DNA, 30 bp, Artificial Sequence; identical to SEQ ID NO: 12821
  Description of Artificial Sequence: Synthetic whey; inner sequence

SEQ ID NO: 44609 - DNA, 30 bp, Artificial Sequence
  Description of Artificial Sequence: Synthetic whey; inner sequence
tgacgcaacgtaccgtatcgtggccatgta

SEQ ID NO: 44610 - DNA, 30 bp, Artificial Sequence
  Description of Artificial Sequence: Synthetic whey; inner sequence
ggacgccacgtaccgtatcgtggccatgta

SEQ ID NO: 44611 - DNA, 30 bp, Artificial Sequence
  Description of Artificial Sequence: Synthetic whey; inner sequence
cacgtgacgtacgtagcagtgtggccgatc

SEQ ID NO: 44612 - DNA, 30 bp, Artificial Sequence; identical to SEQ ID NO: 678
  Description of Artificial Sequence: Synthetic whey; inner sequence

SEQ ID NO: 44613 - DNA, 30 bp, Artificial Sequence; identical to SEQ ID NO: 32191
  Description of Artificial Sequence: Synthetic whey; inner sequence

SEQ ID NO: 44614 - DNA, 30 bp, Artificial Sequence
  Description of Artificial Sequence: Synthetic whey; inner sequence
gacacacagtgacgtcaccatgccgtatcg

SEQ ID NO: 44615 - DNA, 30 bp, Artificial Sequence; identical to SEQ ID NO: 99
  Description of Artificial Sequence: Synthetic whey; inner sequence

SEQ ID NO: 44616 - DNA, 30 bp, Artificial Sequence; identical to SEQ ID NO: 136
  Description of Artificial Sequence: Synthetic whey; inner sequence

SEQ ID NO: 44617 - DNA, 30 bp, Artificial Sequence; identical to SEQ ID NO: 20515
  Description of Artificial Sequence: Synthetic whey; inner sequence

SEQ ID NO: 44618 - DNA, 30 bp, Artificial Sequence; identical to SEQ ID NO: 4940
  Description of Artificial Sequence: Synthetic whey; inner sequence

SEQ ID NO: 44619 - DNA, 30 bp, Artificial Sequence
  Description of Artificial Sequence: Synthetic whey; inner sequence
gtacgcatcttcccgtcatgtggttccgta

SEQ ID NO: 44620 - DNA, 30 bp, Artificial Sequence
  Description of Artificial Sequence: Synthetic whey; inner sequence
gtcactgtgcctgaccgtcaaggtgcggca

SEQ ID NO: 44621 - DNA, 30 bp, Artificial Sequence; identical to SEQ ID NO: 291
  Description of Artificial Sequence: Synthetic whey; inner sequence

SEQ ID NO: 44622 - DNA, 30 bp, Artificial Sequence; identical to SEQ ID NO: 28677
  Description of Artificial Sequence: Synthetic whey; inner sequence

SEQ ID NO: 44623 - DNA, 30 bp, Artificial Sequence
  Description of Artificial Sequence: Synthetic whey; inner sequence
gcgttacggtgcacgagtacgtccttcgcg

SEQ ID NO: 44624 - DNA, 30 bp, Artificial Sequence; identical to SEQ ID NO: 28312
  Description of Artificial Sequence: Synthetic whey; inner sequence

SEQ ID NO: 44625 - DNA, 30 bp, Artificial Sequence; identical to SEQ ID NO: 4790
  Description of Artificial Sequence: Synthetic whey; inner sequence

SEQ ID NO: 44626 - DNA, 26 bp, Artificial Sequence
  Description of Artificial Sequence: Synthetic whey; inner sequence
gtcatgccatcccttcgagtgtgaca

SEQ ID NO: 44627 - DNA, 30 bp, Artificial Sequence
  Description of Artificial Sequence: Synthetic whey; inner sequence
ggacgcaacgtaccgtatcgtgtccatgta

SEQ ID NO: 44628 - DNA, 30 bp, Artificial Sequence; identical to SEQ ID NO: 28979
  Description of Artificial Sequence: Synthetic whey; inner sequence

SEQ ID NO: 44629 - DNA, 30 bp, Artificial Sequence; identical to SEQ ID NO: 688
  Description of Artificial Sequence: Synthetic whey; inner sequence

SEQ ID NO: 44630 - DNA, 30 bp, Artificial Sequence; identical to SEQ ID NO: 16677
  Description of Artificial Sequence: Synthetic whey; inner sequence

SEQ ID NO: 44631 - DNA, 30 bp, Artificial Sequence; identical to SEQ ID NO: 28791
  Description of Artificial Sequence: Synthetic whey; inner sequence

SEQ ID NO: 44632 - DNA, 30 bp, Artificial Sequence; identical to SEQ ID NO: 28846
  Description of Artificial Sequence: Synthetic whey; inner sequence

SEQ ID NO: 44633 - DNA, 30 bp, Artificial Sequence; identical to SEQ ID NO: 751
  Description of Artificial Sequence: Synthetic whey; inner sequence

SEQ ID NO: 44634 - DNA, 30 bp, Artificial Sequence
  Description of Artificial Sequence: Synthetic whey; inner sequence
gtacgcatcgtcccgtcatgtggttccgtg

SEQ ID NO: 44635 - DNA, 30 bp, Artificial Sequence
  Description of Artificial Sequence: Synthetic whey; inner sequence
gtcaatgtgcctgaccgtcaagttgcggca

SEQ ID NO: 44636 - DNA, 30 bp, Artificial Sequence
  Description of Artificial Sequence: Synthetic whey; inner sequence
gtcactgtgcctgacagtcaagttgcggca

SEQ ID NO: 44637 - DNA, 30 bp, Artificial Sequence
  Description of Artificial Sequence: Synthetic whey; inner sequence
ggccacagagtacctcaacgtggacgtgca

SEQ ID NO: 44638 - DNA, 30 bp, Artificial Sequence; identical to SEQ ID NO: 16531
  Description of Artificial Sequence: Synthetic whey; inner sequence

SEQ ID NO: 44639 - DNA, 30 bp, Artificial Sequence
  Description of Artificial Sequence: Synthetic whey; inner sequence
gtcatgccatcccttcgagtgcgtcacgta

SEQ ID NO: 44640 - DNA, 30 bp, Artificial Sequence
  Description of Artificial Sequence: Synthetic whey; inner sequence
gtcatgccatcccttcgagtgtgacacgta

SEQ ID NO: 44641 - DNA, 30 bp, Artificial Sequence
  Description of Artificial Sequence: Synthetic whey; inner sequence
cgtgacgatgcgtaacatacgtgctgcctc

SEQ ID NO: 44642 - DNA, 30 bp, Artificial Sequence
  Description of Artificial Sequence: Synthetic whey; inner sequence
acgtcacggtgacgtaacggcgcgcacacg

SEQ ID NO: 44643 - DNA, 30 bp, Artificial Sequence
  Description of Artificial Sequence: Synthetic whey; inner sequence
gtcaccgtgcctgaccgtcaagttgcggca

SEQ ID NO: 44644 - DNA, 30 bp, Artificial Sequence; identical to SEQ ID NO: 20430
  Description of Artificial Sequence: Synthetic whey; inner sequence

SEQ ID NO: 44645 - DNA, 30 bp, Artificial Sequence; identical to SEQ ID NO: 20346
  Description of Artificial Sequence: Synthetic whey; inner sequence

SEQ ID NO: 44646 - DNA, 30 bp, Artificial Sequence; identical to SEQ ID NO: 28705
  Description of Artificial Sequence: Synthetic whey; inner sequence

SEQ ID NO: 44647 - DNA, 30 bp, Artificial Sequence; identical to SEQ ID NO: 28670
  Description of Artificial Sequence: Synthetic whey; inner sequence

SEQ ID NO: 44648 - DNA, 30 bp, Artificial Sequence; identical to SEQ ID NO: 32193
  Description of Artificial Sequence: Synthetic whey; inner sequence

SEQ ID NO: 44649 - DNA, 30 bp, Artificial Sequence; identical to SEQ ID NO: 20594
  Description of Artificial Sequence: Synthetic whey; inner sequence

SEQ ID NO: 44650 - DNA, 30 bp, Artificial Sequence
  Description of Artificial Sequence: Synthetic whey; inner sequence
tgacgtgaggcaacgtgcagacgtgacgca

SEQ ID NO: 44651 - DNA, 30 bp, Artificial Sequence
  Description of Artificial Sequence: Synthetic whey; inner sequence
ggcactgtgcctgaccgtcaagttgcggca

SEQ ID NO: 44652 - DNA, 30 bp, Artificial Sequence
  Description of Artificial Sequence: Synthetic whey; inner sequence
gtacgcatcgttccgtcatgtggttccgta

SEQ ID NO: 44653 - DNA, 30 bp, Artificial Sequence; identical to SEQ ID NO: 20596
  Description of Artificial Sequence: Synthetic whey; inner sequence

SEQ ID NO: 44654 - DNA, 30 bp, Artificial Sequence; identical to SEQ ID NO: 20923
  Description of Artificial Sequence: Synthetic whey; inner sequence

SEQ ID NO: 44655 - DNA, 30 bp, Artificial Sequence
  Description of Artificial Sequence: Synthetic whey; inner sequence
acatcgcgtcactatcatgtgtgtcacgta

SEQ ID NO: 44656 - DNA, 30 bp, Artificial Sequence
  Description of Artificial Sequence: Synthetic whey; inner sequence
cgatacgcaaggaccatgcgtgacttcgcg

SEQ ID NO: 44657 - DNA, 30 bp, Artificial Sequence
  Description of Artificial Sequence: Synthetic whey; inner sequence
cgacacgtagcacggcacgtcacgtcctgc

SEQ ID NO: 44658 - DNA, 30 bp, Artificial Sequence; identical to SEQ ID NO: 32505
  Description of Artificial Sequence: Synthetic whey; inner sequence

SEQ ID NO: 44659 - DNA, 30 bp, Artificial Sequence; identical to SEQ ID NO: 998
  Description of Artificial Sequence: Synthetic whey; inner sequence

SEQ ID NO: 44660 - DNA, 30 bp, Artificial Sequence; identical to SEQ ID NO: 8926
  Description of Artificial Sequence: Synthetic whey; inner sequence

SEQ ID NO: 44661 - DNA, 30 bp, Artificial Sequence; identical to SEQ ID NO: 20960
  Description of Artificial Sequence: Synthetic whey; inner sequence

SEQ ID NO: 44662 - DNA, 30 bp, Artificial Sequence
  Description of Artificial Sequence: Synthetic whey; inner sequence
gtcatcccgcatcctacacgtgggcacgta

SEQ ID NO: 44663 - DNA, 30 bp, Artificial Sequence
  Description of Artificial Sequence: Synthetic whey; inner sequence
cgacaacgtgacgtgatgtggacgtgcgcc

SEQ ID NO: 44664 - DNA, 30 bp, Artificial Sequence; identical to SEQ ID NO: 17001
  Description of Artificial Sequence: Synthetic whey; inner sequence

SEQ ID NO: 44665 - DNA, 30 bp, Artificial Sequence; identical to SEQ ID NO: 162
  Description of Artificial Sequence: Synthetic whey; inner sequence

SEQ ID NO: 44666 - DNA, 30 bp, Artificial Sequence; identical to SEQ ID NO: 20831
  Description of Artificial Sequence: Synthetic whey; inner sequence

SEQ ID NO: 44667 - DNA, 30 bp, Artificial Sequence; identical to SEQ ID NO: 20795
  Description of Artificial Sequence: Synthetic whey; inner sequence

SEQ ID NO: 44668 - DNA, 30 bp, Artificial Sequence
  Description of Artificial Sequence: Synthetic whey; inner sequence
ggacggaacgtaccgtatcgtggccatgtg

SEQ ID NO: 44669 - DNA, 30 bp, Artificial Sequence; identical to SEQ ID NO: 406
  Description of Artificial Sequence: Synthetic whey; inner sequence

SEQ ID NO: 44670 - DNA, 30 bp, Artificial Sequence; identical to SEQ ID NO: 4837
  Description of Artificial Sequence: Synthetic whey; inner sequence

SEQ ID NO: 44671 - DNA, 30 bp, Artificial Sequence; identical to SEQ ID NO: 28844
  Description of Artificial Sequence: Synthetic whey; inner sequence

SEQ ID NO: 44672 - DNA, 30 bp, Artificial Sequence; identical to SEQ ID NO: 452
  Description of Artificial Sequence: Synthetic whey; inner sequence

SEQ ID NO: 44673 - DNA, 30 bp, Artificial Sequence; identical to SEQ ID NO: 103
  Description of Artificial Sequence: Synthetic whey; inner sequence

SEQ ID NO: 44674 - DNA, 30 bp, Artificial Sequence
  Description of Artificial Sequence: Synthetic whey; inner sequence
ggccatagcgtacctcaacgtggacgtgca

SEQ ID NO: 44675 - DNA, 30 bp, Artificial Sequence; identical to SEQ ID NO: 477
  Description of Artificial Sequence: Synthetic whey; inner sequence

SEQ ID NO: 44676 - DNA, 30 bp, Artificial Sequence; identical to SEQ ID NO: 16573
  Description of Artificial Sequence: Synthetic whey; inner sequence

SEQ ID NO: 44677 - DNA, 30 bp, Artificial Sequence
  Description of Artificial Sequence: Synthetic whey; inner sequence
gtcactgagcctgaccgtcaagttgcggca

SEQ ID NO: 44678 - DNA, 30 bp, Artificial Sequence
  Description of Artificial Sequence: Synthetic whey; inner sequence
gcgtcacgatgcatccacatgtactgcgcg

SEQ ID NO: 44679 - DNA, 30 bp, Artificial Sequence; identical to SEQ ID NO: 32304
  Description of Artificial Sequence: Synthetic whey; inner sequence

SEQ ID NO: 44680 - DNA, 30 bp, Artificial Sequence
  Description of Artificial Sequence: Synthetic whey; inner sequence
cgtgacacgacacacatcgatgcatgcgcg

SEQ ID NO: 44681 - DNA, 30 bp, Artificial Sequence; identical to SEQ ID NO: 242
  Description of Artificial Sequence: Synthetic whey; inner sequence

SEQ ID NO: 44682 - DNA, 30 bp, Artificial Sequence; identical to SEQ ID NO: 89
  Description of Artificial Sequence: Synthetic whey; inner sequence

SEQ ID NO: 44683 - DNA, 30 bp, Artificial Sequence; identical to SEQ ID NO: 20815
  Description of Artificial Sequence: Synthetic whey; inner sequence

SEQ ID NO: 44684 - DNA, 30 bp, Artificial Sequence; identical to SEQ ID NO: 20724
  Description of Artificial Sequence: Synthetic whey; inner sequence

SEQ ID NO: 44685 - DNA, 30 bp, Artificial Sequence; identical to SEQ ID NO: 375
  Description of Artificial Sequence: Synthetic whey; inner sequence

SEQ ID NO: 44686 - DNA, 30 bp, Artificial Sequence; identical to SEQ ID NO: 687
  Description of Artificial Sequence: Synthetic whey; inner sequence

SEQ ID NO: 44687 - DNA, 30 bp, Artificial Sequence; identical to SEQ ID NO: 20650
  Description of Artificial Sequence: Synthetic whey; inner sequence

SEQ ID NO: 44688 - DNA, 30 bp, Artificial Sequence
  Description of Artificial Sequence: Synthetic whey; inner sequence
cgacgcgcagtgacgtacatgcagttcgcc

SEQ ID NO: 44689 - DNA, 30 bp, Artificial Sequence; identical to SEQ ID NO: 128
  Description of Artificial Sequence: Synthetic whey; inner sequence

SEQ ID NO: 44690 - DNA, 30 bp, Artificial Sequence
  Description of Artificial Sequence: Synthetic whey; inner sequence
cgatgcaacgtgacgtgaccattcgccgcg

SEQ ID NO: 44691 - DNA, 30 bp, Artificial Sequence; identical to SEQ ID NO: 171
  Description of Artificial Sequence: Synthetic whey; inner sequence

SEQ ID NO: 44692 - DNA, 30 bp, Artificial Sequence; identical to SEQ ID NO: 133
  Description of Artificial Sequence: Synthetic whey; inner sequence

SEQ ID NO: 44693 - DNA, 30 bp, Artificial Sequence; identical to SEQ ID NO: 20700
  Description of Artificial Sequence: Synthetic whey; inner sequence

SEQ ID NO: 44694 - DNA, 30 bp, Artificial Sequence; identical to SEQ ID NO: 522
  Description of Artificial Sequence: Synthetic whey; inner sequence

SEQ ID NO: 44695 - DNA, 30 bp, Artificial Sequence; identical to SEQ ID NO: 991
  Description of Artificial Sequence: Synthetic whey; inner sequence

SEQ ID NO: 44696 - DNA, 30 bp, Artificial Sequence
  Description of Artificial Sequence: Synthetic whey; inner sequence
gtcatgctatcccttcgagtgtgacaggta

SEQ ID NO: 44697 - DNA, 30 bp, Artificial Sequence; identical to SEQ ID NO: 28389
  Description of Artificial Sequence: Synthetic whey; inner sequence

SEQ ID NO: 44698 - DNA, 30 bp, Artificial Sequence
  Description of Artificial Sequence: Synthetic whey; inner sequence
ggacgcaccgtaccgtatcgtggccatgtg

SEQ ID NO: 44699 - DNA, 26 bp, Artificial Sequence
  Description of Artificial Sequence: Synthetic whey; inner sequence
gtcatgccatcccttcgagtgcgtca

SEQ ID NO: 44700 - DNA, 30 bp, Artificial Sequence; identical to SEQ ID NO: 24984
  Description of Artificial Sequence: Synthetic whey; inner sequence

SEQ ID NO: 44701 - DNA, 30 bp, Artificial Sequence; identical to SEQ ID NO: 306
  Description of Artificial Sequence: Synthetic whey; inner sequence

SEQ ID NO: 44702 - DNA, 30 bp, Artificial Sequence
  Description of Artificial Sequence: Synthetic whey; inner sequence
ccatcccgtcactatcatgtgtgtcacgta

SEQ ID NO: 44703 - DNA, 30 bp, Artificial Sequence; identical to SEQ ID NO: 407
  Description of Artificial Sequence: Synthetic whey; inner sequence

SEQ ID NO: 44704 - DNA, 30 bp, Artificial Sequence
  Description of Artificial Sequence: Synthetic whey; inner sequence
ggaagcaacgtaccgtatcgtggccatgtg

SEQ ID NO: 44705 - DNA, 30 bp, Artificial Sequence; identical to SEQ ID NO: 277
  Description of Artificial Sequence: Synthetic whey; inner sequence

SEQ ID NO: 44706 - DNA, 30 bp, Artificial Sequence; identical to SEQ ID NO: 28996
  Description of Artificial Sequence: Synthetic whey; inner sequence

SEQ ID NO: 44707 - DNA, 30 bp, Artificial Sequence; identical to SEQ ID NO: 663
  Description of Artificial Sequence: Synthetic whey; inner sequence

SEQ ID NO: 44708 - DNA, 30 bp, Artificial Sequence; identical to SEQ ID NO: 774
  Description of Artificial Sequence: Synthetic whey; inner sequence

SEQ ID NO: 44709 - DNA, 30 bp, Artificial Sequence; identical to SEQ ID NO: 16634
  Description of Artificial Sequence: Synthetic whey; inner sequence

SEQ ID NO: 44710 - DNA, 30 bp, Artificial Sequence; identical to SEQ ID NO: 527
  Description of Artificial Sequence: Synthetic whey; inner sequence

SEQ ID NO: 44711 - DNA, 30 bp, Artificial Sequence
  Description of Artificial Sequence: Synthetic whey; inner sequence
catgcatgacgacgatgcgccttgttcacg

SEQ ID NO: 44712 - DNA, 30 bp, Artificial Sequence; identical to SEQ ID NO: 112
  Description of Artificial Sequence: Synthetic whey; inner sequence

SEQ ID NO: 44713 - DNA, 30 bp, Artificial Sequence; identical to SEQ ID NO: 16342
  Description of Artificial Sequence: Synthetic whey; inner sequence

SEQ ID NO: 44714 - DNA, 30 bp, Artificial Sequence; identical to SEQ ID NO: 223
  Description of Artificial Sequence: Synthetic whey; inner sequence

SEQ ID NO: 44715 - DNA, 30 bp, Artificial Sequence
  Description of Artificial Sequence: Synthetic whey; inner sequence
cgtgcgtgacgatgcgaacgtggctacgcg

SEQ ID NO: 44716 - DNA, 30 bp, Artificial Sequence; identical to SEQ ID NO: 20545
  Description of Artificial Sequence: Synthetic whey; inner sequence

SEQ ID NO: 44717 - DNA, 30 bp, Artificial Sequence; identical to SEQ ID NO: 20307
  Description of Artificial Sequence: Synthetic whey; inner sequence

SEQ ID NO: 44718 - DNA, 30 bp, Artificial Sequence; identical to SEQ ID NO: 20793
  Description of Artificial Sequence: Synthetic whey; inner sequence

SEQ ID NO: 44719 - DNA, 30 bp, Artificial Sequence; identical to SEQ ID NO: 28668
  Description of Artificial Sequence: Synthetic whey; inner sequence

SEQ ID NO: 44720 - DNA, 30 bp, Artificial Sequence; identical to SEQ ID NO: 28750
  Description of Artificial Sequence: Synthetic whey; inner sequence

SEQ ID NO: 44721 - DNA, 30 bp, Artificial Sequence; identical to SEQ ID NO: 20673
  Description of Artificial Sequence: Synthetic whey; inner sequence

SEQ ID NO: 44722 - DNA, 30 bp, Artificial Sequence
  Description of Artificial Sequence: Synthetic whey; inner sequence
cgacaacgaggcacgttacgtcacgtcacg

SEQ ID NO: 44723 - DNA, 30 bp, Artificial Sequence
  Description of Artificial Sequence: Synthetic whey; inner sequence
ggccacagcgtacctcaacgtggacgttca

SEQ ID NO: 44724 - DNA, 30 bp, Artificial Sequence
  Description of Artificial Sequence: Synthetic whey; inner sequence
ccatcgagtcactatcatgtgtgtcacgta

SEQ ID NO: 44725 - DNA, 30 bp, Artificial Sequence; identical to SEQ ID NO: 20518
  Description of Artificial Sequence: Synthetic whey; inner sequence

SEQ ID NO: 44726 - DNA, 30 bp, Artificial Sequence
  Description of Artificial Sequence: Synthetic whey; inner sequence
cgtggcaacgtacgtacgtcaccttgcgcg

SEQ ID NO: 44727 - DNA, 30 bp, Artificial Sequence; identical to SEQ ID NO: 20644
  Description of Artificial Sequence: Synthetic whey; inner sequence

SEQ ID NO: 44728 - DNA, 30 bp, Artificial Sequence
  Description of Artificial Sequence: Synthetic whey; inner sequence
ttcactgtgcctgaccgtcaagttgcggca

SEQ ID NO: 44729 - DNA, 30 bp, Artificial Sequence; identical to SEQ ID NO: 561
  Description of Artificial Sequence: Synthetic whey; inner sequence

SEQ ID NO: 44730 - DNA, 30 bp, Artificial Sequence; identical to SEQ ID NO: 28915
  Description of Artificial Sequence: Synthetic whey; inner sequence

SEQ ID NO: 44731 - DNA, 30 bp, Artificial Sequence; identical to SEQ ID NO: 20970
  Description of Artificial Sequence: Synthetic whey; inner sequence

SEQ ID NO: 44732 - DNA, 30 bp, Artificial Sequence
  Description of Artificial Sequence: Synthetic whey; inner sequence
gcgaacagcacgtacgtcactgcgcgtgcc

SEQ ID NO: 44733 - DNA, 30 bp, Artificial Sequence
  Description of Artificial Sequence: Synthetic whey; inner sequence
gtcactgtgcctgaccggcaagttgcggca

SEQ ID NO: 44734 - DNA, 30 bp, Artificial Sequence; identical to SEQ ID NO: 16504
  Description of Artificial Sequence: Synthetic whey; inner sequence

SEQ ID NO: 44735 - DNA, 30 bp, Artificial Sequence; identical to SEQ ID NO: 4489
  Description of Artificial Sequence: Synthetic whey; inner sequence

SEQ ID NO: 44736 - DNA, 30 bp, Artificial Sequence
  Description of Artificial Sequence: Synthetic whey; inner sequence
gtcatgccatcccttagagtgtgacaggta

SEQ ID NO: 44737 - DNA, 30 bp, Artificial Sequence
  Description of Artificial Sequence: Synthetic whey; inner sequence
gaccacagcgtacctcaacgtggacgtgca

SEQ ID NO: 44738 - DNA, 30 bp, Artificial Sequence
  Description of Artificial Sequence: Synthetic whey; inner sequence
acgcatgcagaccgtaacgtacagtgcgcg

SEQ ID NO: 44739 - DNA, 30 bp, Artificial Sequence
  Description of Artificial Sequence: Synthetic whey; inner sequence
acgtcacgcacagcgtcacgttccgatgcg

SEQ ID NO: 44740 - DNA, 30 bp, Artificial Sequence
  Description of Artificial Sequence: Synthetic whey; inner sequence
catggcaacgacgcatggtacggcagcacg

SEQ ID NO: 44741 - DNA, 30 bp, Artificial Sequence
  Description of Artificial Sequence: Synthetic whey; inner sequence
ggtacgcagtcacgcagcaacgtcgtcacg

SEQ ID NO: 44742 - DNA, 30 bp, Artificial Sequence
  Description of Artificial Sequence: Synthetic whey; inner sequence
cgatacgtatcgcgtcgtccatccgtcacg

SEQ ID NO: 44743 - DNA, 30 bp, Artificial Sequence; identical to SEQ ID NO: 20475
  Description of Artificial Sequence: Synthetic whey; inner sequence

SEQ ID NO: 44744 - DNA, 30 bp, Artificial Sequence
  Description of Artificial Sequence: Synthetic whey; inner sequence
ggacgcaacgtaacgtatcgtggccatgtg

SEQ ID NO: 44745 - DNA, 30 bp, Artificial Sequence
  Description of Artificial Sequence: Synthetic whey; inner sequence
gtcactgtgcctgaccgtcaagttccggca

SEQ ID NO: 44746 - DNA, 30 bp, Artificial Sequence; identical to SEQ ID NO: 20648
  Description of Artificial Sequence: Synthetic whey; inner sequence

SEQ ID NO: 44747 - DNA, 30 bp, Artificial Sequence; identical to SEQ ID NO: 20884
  Description of Artificial Sequence: Synthetic whey; inner sequence

SEQ ID NO: 44748 - DNA, 30 bp, Artificial Sequence; identical to SEQ ID NO: 28771
  Description of Artificial Sequence: Synthetic whey; inner sequence

SEQ ID NO: 44749 - DNA, 30 bp, Artificial Sequence; identical to SEQ ID NO: 20413
  Description of Artificial Sequence: Synthetic whey; inner sequence

SEQ ID NO: 44750 - DNA, 30 bp, Artificial Sequence; identical to SEQ ID NO: 28620
  Description of Artificial Sequence: Synthetic whey; inner sequence

SEQ ID NO: 44751 - DNA, 30 bp, Artificial Sequence
  Description of Artificial Sequence: Synthetic whey; inner sequence
cgtgccaacgtaatgccacgtcacctcacg

SEQ ID NO: 44752 - DNA, 30 bp, Artificial Sequence
  Description of Artificial Sequence: Synthetic whey; inner sequence
ggacgcagcgtaacgttcgagtggcacgta

SEQ ID NO: 44753 - DNA, 30 bp, Artificial Sequence
  Description of Artificial Sequence: Synthetic whey; inner sequence
cgtgacgtacgcaacacatcgtcctacgca

SEQ ID NO: 44754 - DNA, 30 bp, Artificial Sequence; identical to SEQ ID NO: 16804
  Description of Artificial Sequence: Synthetic whey; inner sequence

SEQ ID NO: 44755 - DNA, 28 bp, Artificial Sequence
  Description of Artificial Sequence: Synthetic whey; inner sequence
gcacgactcgcaccctatcatgcggtca

SEQ ID NO: 44756 - DNA, 30 bp, Artificial Sequence; identical to SEQ ID NO: 20666
  Description of Artificial Sequence: Synthetic whey; inner sequence

SEQ ID NO: 44757 - DNA, 30 bp, Artificial Sequence; identical to SEQ ID NO: 278
  Description of Artificial Sequence: Synthetic whey; inner sequence

SEQ ID NO: 44758 - DNA, 30 bp, Artificial Sequence
  Description of Artificial Sequence: Synthetic whey; inner sequence
acgatcagcacgcactacaacgtacgcacg

SEQ ID NO: 44759 - DNA, 30 bp, Artificial Sequence; identical to SEQ ID NO: 4230
  Description of Artificial Sequence: Synthetic whey; inner sequence

SEQ ID NO: 44760 - DNA, 30 bp, Artificial Sequence; identical to SEQ ID NO: 576
  Description of Artificial Sequence: Synthetic whey; inner sequence

SEQ ID NO: 44761 - DNA, 31 bp, Artificial Sequence
  Description of Artificial Sequence: Synthetic whey; inner sequence
acgatgcgtaccgatgcgtatgtcgtgcaca

SEQ ID NO: 44762 - DNA, 30 bp, Artificial Sequence; identical to SEQ ID NO: 16988
  Description of Artificial Sequence: Synthetic whey; inner sequence

SEQ ID NO: 44763 - DNA, 30 bp, Artificial Sequence; identical to SEQ ID NO: 567
  Description of Artificial Sequence: Synthetic whey; inner sequence

SEQ ID NO: 44764 - DNA, 30 bp, Artificial Sequence; identical to SEQ ID NO: 5000
  Description of Artificial Sequence: Synthetic whey; inner sequence

SEQ ID NO: 44765 - DNA, 30 bp, Artificial Sequence
  Description of Artificial Sequence: Synthetic whey; inner sequence
cgatggcagaccgtgacgctacgtaacgcg

SEQ ID NO: 44766 - DNA, 29 bp, Artificial Sequence
  Description of Artificial Sequence: Synthetic whey; inner sequence
cgtaccgcaagtgacgtgtccgtgccgtg

SEQ ID NO: 44767 - DNA, 30 bp, Artificial Sequence
  Description of Artificial Sequence: Synthetic whey; inner sequence
gtacgcatcgtcccgtcatgtggttctgta

SEQ ID NO: 44768 - DNA, 30 bp, Artificial Sequence
  Description of Artificial Sequence: Synthetic whey; inner sequence
aacgtgcgcgacgtaacgtatgcaccgtgc

SEQ ID NO: 44769 - DNA, 30 bp, Artificial Sequence; identical to SEQ ID NO: 16457
  Description of Artificial Sequence: Synthetic whey; inner sequence

SEQ ID NO: 44770 - DNA, 30 bp, Artificial Sequence
  Description of Artificial Sequence: Synthetic whey; inner sequence
acgtcaacatgtcgcagttcgtaacgcaca

SEQ ID NO: 44771 - DNA, 30 bp, Artificial Sequence
  Description of Artificial Sequence: Synthetic whey; inner sequence
ggccacagcgtacctcaacgtggacgtaca

SEQ ID NO: 44772 - DNA, 30 bp, Artificial Sequence
  Description of Artificial Sequence: Synthetic whey; inner sequence
gtcactgtgcctgaacgtcaagttgcggca

SEQ ID NO: 44773 - DNA, 30 bp, Artificial Sequence; identical to SEQ ID NO: 28984
  Description of Artificial Sequence: Synthetic whey; inner sequence

SEQ ID NO: 44774 - DNA, 30 bp, Artificial Sequence
  Description of Artificial Sequence: Synthetic whey; inner sequence
aggcacagcgcagtgtcacgttccgatgcg

SEQ ID NO: 44775 - DNA, 30 bp, Artificial Sequence; identical to SEQ ID NO: 20690
  Description of Artificial Sequence: Synthetic whey; inner sequence

SEQ ID NO: 44776 - DNA, 30 bp, Artificial Sequence; identical to SEQ ID NO: 253
  Description of Artificial Sequence: Synthetic whey; inner sequence

SEQ ID NO: 44777 - DNA, 30 bp, Artificial Sequence
  Description of Artificial Sequence: Synthetic whey; inner sequence
cgtgacgacggaacgtgcgtatggtacgca

SEQ ID NO: 44778 - DNA, 30 bp, Artificial Sequence; identical to SEQ ID NO: 883
  Description of Artificial Sequence: Synthetic whey; inner sequence

SEQ ID NO: 44779 - DNA, 30 bp, Artificial Sequence; identical to SEQ ID NO: 943
  Description of Artificial Sequence: Synthetic whey; inner sequence

SEQ ID NO: 44780 - DNA, 30 bp, Artificial Sequence
  Description of Artificial Sequence: Synthetic whey; inner sequence
cgtgcgcaacgacatgtcactgactgcgcg

SEQ ID NO: 44781 - DNA, 30 bp, Artificial Sequence
  Description of Artificial Sequence: Synthetic whey; inner sequence
ggacgcaacgtacagtatcgtggccatgtg

SEQ ID NO: 44782 - DNA, 30 bp, Artificial Sequence
  Description of Artificial Sequence: Synthetic whey; inner sequence
gcgtacggaatggacgtcctgcgctgcacg

SEQ ID NO: 44783 - DNA, 30 bp, Artificial Sequence; identical to SEQ ID NO: 28864
  Description of Artificial Sequence: Synthetic whey; inner sequence

SEQ ID NO: 44784 - DNA, 30 bp, Artificial Sequence; identical to SEQ ID NO: 8949
  Description of Artificial Sequence: Synthetic whey; inner sequence

SEQ ID NO: 44785 - DNA, 30 bp, Artificial Sequence; identical to SEQ ID NO: 331
  Description of Artificial Sequence: Synthetic whey; inner sequence

SEQ ID NO: 44786 - DNA, 30 bp, Artificial Sequence; identical to SEQ ID NO: 529
  Description of Artificial Sequence: Synthetic whey; inner sequence

SEQ ID NO: 44787 - DNA, 30 bp, Artificial Sequence
  Description of Artificial Sequence: Synthetic whey; inner sequence
gtcactgtgcctgaccgtcaagctgcggca

SEQ ID NO: 44788 - DNA, 30 bp, Artificial Sequence; identical to SEQ ID NO: 20820
  Description of Artificial Sequence: Synthetic whey; inner sequence

SEQ ID NO: 44789 - DNA, 30 bp, Artificial Sequence; identical to SEQ ID NO: 8782
  Description of Artificial Sequence: Synthetic whey; inner sequence

SEQ ID NO: 44790 - DNA, 30 bp, Artificial Sequence; identical to SEQ ID NO: 360
  Description of Artificial Sequence: Synthetic whey; inner sequence

SEQ ID NO: 44791 - DNA, 30 bp, Artificial Sequence; identical to SEQ ID NO: 40519
  Description of Artificial Sequence: Synthetic whey; inner sequence

SEQ ID NO: 44792 - DNA, 30 bp, Artificial Sequence; identical to SEQ ID NO: 8993
  Description of Artificial Sequence: Synthetic whey; inner sequence

SEQ ID NO: 44793 - DNA, 30 bp, Artificial Sequence; identical to SEQ ID NO: 16412
  Description of Artificial Sequence: Synthetic whey; inner sequence

SEQ ID NO: 44794 - DNA, 30 bp, Artificial Sequence
  Description of Artificial Sequence: Synthetic whey; inner sequence
gcgagacaacgcgaaccgttacgatgcacg

SEQ ID NO: 44795 - DNA, 30 bp, Artificial Sequence; identical to SEQ ID NO: 8618
  Description of Artificial Sequence: Synthetic whey; inner sequence

SEQ ID NO: 44796 - DNA, 30 bp, Artificial Sequence
  Description of Artificial Sequence: Synthetic whey; inner sequence
acgtcacacgcgttgcatcgatgcgttgcg

SEQ ID NO: 44797 - DNA, 30 bp, Artificial Sequence
  Description of Artificial Sequence: Synthetic whey; inner sequence
acgcaacgcaatgtacgcacatgatgcacg

SEQ ID NO: 44798 - DNA, 30 bp, Artificial Sequence
  Description of Artificial Sequence: Synthetic whey; inner sequence
cgtgtgcagcacaaggacgtacgcactgcc

SEQ ID NO: 44799 - DNA, 30 bp, Artificial Sequence; identical to SEQ ID NO: 531
  Description of Artificial Sequence: Synthetic whey; inner sequence

SEQ ID NO: 44800 - DNA, 30 bp, Artificial Sequence; identical to SEQ ID NO: 20661
  Description of Artificial Sequence: Synthetic whey; inner sequence

SEQ ID NO: 44801 - DNA, 30 bp, Artificial Sequence; identical to SEQ ID NO: 28964
  Description of Artificial Sequence: Synthetic whey; inner sequence

SEQ ID NO: 44802 - DNA, 30 bp, Artificial Sequence; identical to SEQ ID NO: 563
  Description of Artificial Sequence: Synthetic whey; inner sequence

SEQ ID NO: 44803 - DNA, 30 bp, Artificial Sequence
  Description of Artificial Sequence: Synthetic whey; inner sequence
gtcactgtccctgaccgtcaagttgcggca

SEQ ID NO: 44804 - DNA, 30 bp, Artificial Sequence
  Description of Artificial Sequence: Synthetic whey; inner sequence
cacgtacggatgcaacgtagcatgtgcgta

SEQ ID NO: 44805 - DNA, 30 bp, Artificial Sequence
  Description of Artificial Sequence: Synthetic whey; inner sequence
acgatgcgacgtgccattgcgtacgatgcg

SEQ ID NO: 44806 - DNA, 30 bp, Artificial Sequence; identical to SEQ ID NO: 628
  Description of Artificial Sequence: Synthetic whey; inner sequence

SEQ ID NO: 44807 - DNA, 30 bp, Artificial Sequence; identical to SEQ ID NO: 428
  Description of Artificial Sequence: Synthetic whey; inner sequence

SEQ ID NO: 44808 - DNA, 30 bp, Artificial Sequence; identical to SEQ ID NO: 28425
  Description of Artificial Sequence: Synthetic whey; inner sequence

SEQ ID NO: 44809 - DNA, 30 bp, Artificial Sequence; identical to SEQ ID NO: 55
  Description of Artificial Sequence: Synthetic whey; inner sequence

SEQ ID NO: 44810 - DNA, 30 bp, Artificial Sequence; identical to SEQ ID NO: 32379
  Description of Artificial Sequence: Synthetic whey; inner sequence

SEQ ID NO: 44811 - DNA, 30 bp, Artificial Sequence; identical to SEQ ID NO: 275
  Description of Artificial Sequence: Synthetic whey; inner sequence

SEQ ID NO: 44812 - DNA, 30 bp, Artificial Sequence; identical to SEQ ID NO: 12700
  Description of Artificial Sequence: Synthetic whey; inner sequence

SEQ ID NO: 44813 - DNA, 30 bp, Artificial Sequence; identical to SEQ ID NO: 12945
  Description of Artificial Sequence: Synthetic whey; inner sequence

SEQ ID NO: 44814 - DNA, 30 bp, Artificial Sequence; identical to SEQ ID NO: 20576
  Description of Artificial Sequence: Synthetic whey; inner sequence

SEQ ID NO: 44815 - DNA, 30 bp, Artificial Sequence; identical to SEQ ID NO: 20701
  Description of Artificial Sequence: Synthetic whey; inner sequence

SEQ ID NO: 44816 - DNA, 30 bp, Artificial Sequence
  Description of Artificial Sequence: Synthetic whey; inner sequence
cacgcaacgtacgatcgtagtgtcgttggc

SEQ ID NO: 44817 - DNA, 30 bp, Artificial Sequence
  Description of Artificial Sequence: Synthetic whey; inner sequence
cgtaccgcaagtgacgtgtccgtgccgtgt

SEQ ID NO: 44818 - DNA, 30 bp, Artificial Sequence; identical to SEQ ID NO: 168
  Description of Artificial Sequence: Synthetic whey; inner sequence

SEQ ID NO: 44819 - DNA, 30 bp, Artificial Sequence
  Description of Artificial Sequence: Synthetic whey; inner sequence
cacgtcagacacatcgtccgttacgtcacg

SEQ ID NO: 44820 - DNA, 30 bp, Artificial Sequence
  Description of Artificial Sequence: Synthetic whey; inner sequence
gcactactcgcaccctatcatgtaggcatg

SEQ ID NO: 44821 - DNA, 30 bp, Artificial Sequence
  Description of Artificial Sequence: Synthetic whey; inner sequence
ccatcgcgtccctatcatgtgtgtcacgta

SEQ ID NO: 44822 - DNA, 30 bp, Artificial Sequence; identical to SEQ ID NO: 13002
  Description of Artificial Sequence: Synthetic whey; inner sequence

SEQ ID NO: 44823 - DNA, 30 bp, Artificial Sequence; identical to SEQ ID NO: 20353
  Description of Artificial Sequence: Synthetic whey; inner sequence

SEQ ID NO: 44824 - DNA, 30 bp, Artificial Sequence; identical to SEQ ID NO: 28659
  Description of Artificial Sequence: Synthetic whey; inner sequence

SEQ ID NO: 44825 - DNA, 30 bp, Artificial Sequence
  Description of Artificial Sequence: Synthetic whey; inner sequence
gtcactgtgcttgaccgtcaagttgcggca

SEQ ID NO: 44826 - DNA, 30 bp, Artificial Sequence; identical to SEQ ID NO: 257
  Description of Artificial Sequence: Synthetic whey; inner sequence

SEQ ID NO: 44827 - DNA, 30 bp, Artificial Sequence; identical to SEQ ID NO: 809
  Description of Artificial Sequence: Synthetic whey; inner sequence

SEQ ID NO: 44828 - DNA, 30 bp, Artificial Sequence; identical to SEQ ID NO: 583
  Description of Artificial Sequence: Synthetic whey; inner sequence

SEQ ID NO: 44829 - DNA, 30 bp, Artificial Sequence; identical to SEQ ID NO: 28114
  Description of Artificial Sequence: Synthetic whey; inner sequence

SEQ ID NO: 44830 - DNA, 30 bp, Artificial Sequence
  Description of Artificial Sequence: Synthetic whey; inner sequence
gtcatgccaccccttcgagtgtgacaggta

SEQ ID NO: 44831 - DNA, 30 bp, Artificial Sequence; identical to SEQ ID NO: 20692
  Description of Artificial Sequence: Synthetic whey; inner sequence

SEQ ID NO: 44832 - DNA, 30 bp, Artificial Sequence; identical to SEQ ID NO: 311
  Description of Artificial Sequence: Synthetic whey; inner sequence

SEQ ID NO: 44833 - DNA, 30 bp, Artificial Sequence
  Description of Artificial Sequence: Synthetic whey; inner sequence
cgtgacagcatcgtacgtacggaccgcgcg

SEQ ID NO: 44834 - DNA, 30 bp, Artificial Sequence
  Description of Artificial Sequence: Synthetic whey; inner sequence
ggacgcaacgaaccgtatcgtggccatgta

SEQ ID NO: 44835 - DNA, 30 bp, Artificial Sequence
  Description of Artificial Sequence: Synthetic whey; inner sequence
gcacgactcgcaccctatcatgagggcatg

SEQ ID NO: 44836 - DNA, 30 bp, Artificial Sequence; identical to SEQ ID NO: 36827
  Description of Artificial Sequence: Synthetic whey; inner sequence

SEQ ID NO: 44837 - DNA, 30 bp, Artificial Sequence
  Description of Artificial Sequence: Synthetic whey; inner sequence
gtcactgtgcctgaccgtcaagttgcggcg

SEQ ID NO: 44838 - DNA, 30 bp, Artificial Sequence
  Description of Artificial Sequence: Synthetic whey; inner sequence
ggacgcaacgtaccgtatcgtggacatgtg

SEQ ID NO: 44839 - DNA, 30 bp, Artificial Sequence
  Description of Artificial Sequence: Synthetic whey; inner sequence
gtcatgccatcccttcgagtgtgataggta

SEQ ID NO: 44840 - DNA, 30 bp, Artificial Sequence; identical to SEQ ID NO: 20797
  Description of Artificial Sequence: Synthetic whey; inner sequence

SEQ ID NO: 44841 - DNA, 30 bp, Artificial Sequence
  Description of Artificial Sequence: Synthetic whey; inner sequence
ggacgcaacgtaccgtatcgtggccacgtg

SEQ ID NO: 44842 - DNA, 30 bp, Artificial Sequence; identical to SEQ ID NO: 16612
  Description of Artificial Sequence: Synthetic whey; inner sequence

SEQ ID NO: 44843 - DNA, 30 bp, Artificial Sequence
  Description of Artificial Sequence: Synthetic whey; inner sequence
cgtgacgcgatggtgacgtaccttgccgta

SEQ ID NO: 44844 - DNA, 30 bp, Artificial Sequence; identical to SEQ ID NO: 28737
  Description of Artificial Sequence: Synthetic whey; inner sequence

SEQ ID NO: 44845 - DNA, 30 bp, Artificial Sequence
  Description of Artificial Sequence: Synthetic whey; inner sequence
gcgcgaacgacctgcatgtacgttgacgcg

SEQ ID NO: 44846 - DNA, 30 bp, Artificial Sequence
  Description of Artificial Sequence: Synthetic whey; inner sequence
cacgacgtacgtgacgctatgcactgcgtg

SEQ ID NO: 44847 - DNA, 30 bp, Artificial Sequence; identical to SEQ ID NO: 20415
  Description of Artificial Sequence: Synthetic whey; inner sequence

SEQ ID NO: 44848 - DNA, 30 bp, Artificial Sequence; identical to SEQ ID NO: 20952
  Description of Artificial Sequence: Synthetic whey; inner sequence

SEQ ID NO: 44849 - DNA, 30 bp, Artificial Sequence
  Description of Artificial Sequence: Synthetic whey; inner sequence
cgtgcgagacgatgttggcgtgacgtcgcg

SEQ ID NO: 44850 - DNA, 30 bp, Artificial Sequence; identical to SEQ ID NO: 269
  Description of Artificial Sequence: Synthetic whey; inner sequence

SEQ ID NO: 44851 - DNA, 30 bp, Artificial Sequence; identical to SEQ ID NO: 8401
  Description of Artificial Sequence: Synthetic whey; inner sequence

SEQ ID NO: 44852 - DNA, 30 bp, Artificial Sequence; identical to SEQ ID NO: 507
  Description of Artificial Sequence: Synthetic whey; inner sequence

SEQ ID NO: 44853 - DNA, 30 bp, Artificial Sequence
  Description of Artificial Sequence: Synthetic whey; inner sequence
gttacgcagtgacgcatcacgtacgccacc

SEQ ID NO: 44854 - DNA, 30 bp, Artificial Sequence; identical to SEQ ID NO: 39
  Description of Artificial Sequence: Synthetic whey; inner sequence

SEQ ID NO: 44855 - DNA, 30 bp, Artificial Sequence
  Description of Artificial Sequence: Synthetic whey; inner sequence
cgtgcacagtcacgttggcacatcgtcaca

SEQ ID NO: 44856 - DNA, 30 bp, Artificial Sequence
  Description of Artificial Sequence: Synthetic whey; inner sequence
gtcactgtacctgaccgtcaagttgcggca

SEQ ID NO: 44857 - DNA, 30 bp, Artificial Sequence; identical to SEQ ID NO: 16703
  Description of Artificial Sequence: Synthetic whey; inner sequence

SEQ ID NO: 44858 - DNA, 30 bp, Artificial Sequence; identical to SEQ ID NO: 20913
  Description of Artificial Sequence: Synthetic whey; inner sequence

SEQ ID NO: 44859 - DNA, 30 bp, Artificial Sequence
  Description of Artificial Sequence: Synthetic whey; inner sequence
acgtgacgcagcgtagtatcgtactgcaca

SEQ ID NO: 44860 - DNA, 30 bp, Artificial Sequence; identical to SEQ ID NO: 234
  Description of Artificial Sequence: Synthetic whey; inner sequence

SEQ ID NO: 44861 - DNA, 30 bp, Artificial Sequence; identical to SEQ ID NO: 28603
  Description of Artificial Sequence: Synthetic whey; inner sequence

SEQ ID NO: 44862 - DNA, 30 bp, Artificial Sequence; identical to SEQ ID NO: 16949
  Description of Artificial Sequence: Synthetic whey; inner sequence

SEQ ID NO: 44863 - DNA, 30 bp, Artificial Sequence; identical to SEQ ID NO: 909
  Description of Artificial Sequence: Synthetic whey; inner sequence

SEQ ID NO: 44864 - DNA, 30 bp, Artificial Sequence
  Description of Artificial Sequence: Synthetic whey; inner sequence
cgtacggcaccacgcatacgtcacttcggc

SEQ ID NO: 44865 - DNA, 30 bp, Artificial Sequence
  Description of Artificial Sequence: Synthetic whey; inner sequence
cgttacgcaacacaaacgtacgcatgcacg

SEQ ID NO: 44866 - DNA, 30 bp, Artificial Sequence; identical to SEQ ID NO: 756
  Description of Artificial Sequence: Synthetic whey; inner sequence

SEQ ID NO: 44867 - DNA, 30 bp, Artificial Sequence; identical to SEQ ID NO: 16966
  Description of Artificial Sequence: Synthetic whey; inner sequence

SEQ ID NO: 44868 - DNA, 30 bp, Artificial Sequence; identical to SEQ ID NO: 120
  Description of Artificial Sequence: Synthetic whey; inner sequence

SEQ ID NO: 44869 - DNA, 30 bp, Artificial Sequence; identical to SEQ ID NO: 292
  Description of Artificial Sequence: Synthetic whey; inner sequence

SEQ ID NO: 44870 - DNA, 30 bp, Artificial Sequence; identical to SEQ ID NO: 16979
  Description of Artificial Sequence: Synthetic whey; inner sequence

SEQ ID NO: 44871 - DNA, 30 bp, Artificial Sequence; identical to SEQ ID NO: 20669
  Description of Artificial Sequence: Synthetic whey; inner sequence

SEQ ID NO: 44872 - DNA, 30 bp, Artificial Sequence; identical to SEQ ID NO: 16655
  Description of Artificial Sequence: Synthetic whey; inner sequence

SEQ ID NO: 44873 - DNA, 30 bp, Artificial Sequence
  Description of Artificial Sequence: Synthetic whey; inner sequence
cgtacggtacggcgatggaggtacgtcgcg

SEQ ID NO: 44874 - DNA, 30 bp, Artificial Sequence
  Description of Artificial Sequence: Synthetic whey; inner sequence
ggccacagcgtacctcaacgtggacgtgga

SEQ ID NO: 44875 - DNA, 30 bp, Artificial Sequence; identical to SEQ ID NO: 20598
  Description of Artificial Sequence: Synthetic whey; inner sequence

SEQ ID NO: 44876 - DNA, 30 bp, Artificial Sequence; identical to SEQ ID NO: 28412
  Description of Artificial Sequence: Synthetic whey; inner sequence

SEQ ID NO: 44877 - DNA, 30 bp, Artificial Sequence; identical to SEQ ID NO: 20668
  Description of Artificial Sequence: Synthetic whey; inner sequence

SEQ ID NO: 44878 - DNA, 30 bp, Artificial Sequence
  Description of Artificial Sequence: Synthetic whey; inner sequence
ggacgcagcgtaccgtatcgtggccatgtg

SEQ ID NO: 44879 - DNA, 30 bp, Artificial Sequence
  Description of Artificial Sequence: Synthetic whey; inner sequence
cgtgtgcgcaacgtgacacggtccttcgca

SEQ ID NO: 44880 - DNA, 30 bp, Artificial Sequence
  Description of Artificial Sequence: Synthetic whey; inner sequence
ccatcgcgtcactataatgtgtgtcacgta

SEQ ID NO: 44881 - DNA, 30 bp, Artificial Sequence
  Description of Artificial Sequence: Synthetic whey; inner sequence
cgtgtacgacgcgacaacgtgcctgccgtg

SEQ ID NO: 44882 - DNA, 30 bp, Artificial Sequence; identical to SEQ ID NO: 85
  Description of Artificial Sequence: Synthetic whey; inner sequence

SEQ ID NO: 44883 - DNA, 30 bp, Artificial Sequence
  Description of Artificial Sequence: Synthetic whey; inner sequence
acgtcacacgcacaggtacgttgtggtacg

SEQ ID NO: 44884 - DNA, 30 bp, Artificial Sequence
  Description of Artificial Sequence: Synthetic whey; inner sequence
acgtcacaacgcagcgtccgttcgtacggt

SEQ ID NO: 44885 - DNA, 30 bp, Artificial Sequence
  Description of Artificial Sequence: Synthetic whey; inner sequence
gtcactctgcctgaccgtcaagttgcggca

SEQ ID NO: 44886 - DNA, 30 bp, Artificial Sequence
  Description of Artificial Sequence: Synthetic whey; inner sequence
tgtgcacacaccgtatgtcctcacgtcacg

SEQ ID NO: 44887 - DNA, 30 bp, Artificial Sequence; identical to SEQ ID NO: 28557
  Description of Artificial Sequence: Synthetic whey; inner sequence

SEQ ID NO: 44888 - DNA, 30 bp, Artificial Sequence
  Description of Artificial Sequence: Synthetic whey; inner sequence
cgtgcgacagtacgacgagatgtgcgtgtc

SEQ ID NO: 44889 - DNA, 30 bp, Artificial Sequence
  Description of Artificial Sequence: Synthetic whey; inner sequence
gcgatgtcgcaacgatgtacggtctgcacg

SEQ ID NO: 44890 - DNA, 30 bp, Artificial Sequence
  Description of Artificial Sequence: Synthetic whey; inner sequence
acgtcacaacgcgtgtcgtccgttcgcgcc

SEQ ID NO: 44891 - DNA, 30 bp, Artificial Sequence
  Description of Artificial Sequence: Synthetic whey; inner sequence
cgatcacgatgcgaacacatggcctgcagc

SEQ ID NO: 44892 - DNA, 30 bp, Artificial Sequence; identical to SEQ ID NO: 28595
  Description of Artificial Sequence: Synthetic whey; inner sequence

SEQ ID NO: 44893 - DNA, 30 bp, Artificial Sequence; identical to SEQ ID NO: 317
  Description of Artificial Sequence: Synthetic whey; inner sequence

SEQ ID NO: 44894 - DNA, 30 bp, Artificial Sequence
  Description of Artificial Sequence: Synthetic whey; inner sequence
ggacgcaacgtaccgaatcgtggccatgtg

SEQ ID NO: 44895 - DNA, 30 bp, Artificial Sequence
  Description of Artificial Sequence: Synthetic whey; inner sequence
gtcactgtgcccgaccgtcaagttgcggca

SEQ ID NO: 44896 - DNA, 30 bp, Artificial Sequence; identical to SEQ ID NO: 32136
  Description of Artificial Sequence: Synthetic whey; inner sequence

SEQ ID NO: 44897 - DNA, 30 bp, Artificial Sequence; identical to SEQ ID NO: 179
  Description of Artificial Sequence: Synthetic whey; inner sequence

SEQ ID NO: 44898 - DNA, 30 bp, Artificial Sequence
  Description of Artificial Sequence: Synthetic whey; inner sequence
gcgttggcgacgagtgcgtgacgttacgcg

SEQ ID NO: 44899 - DNA, 30 bp, Artificial Sequence; identical to SEQ ID NO: 20736
  Description of Artificial Sequence: Synthetic whey; inner sequence

SEQ ID NO: 44900 - DNA, 30 bp, Artificial Sequence
  Description of Artificial Sequence: Synthetic whey; inner sequence
gcgtggcgtaacgcagcgtgtggcatcgcg

SEQ ID NO: 44901 - DNA, 30 bp, Artificial Sequence
  Description of Artificial Sequence: Synthetic whey; inner sequence
tgtgcgaaacggaccgcatgttacgtcaca

SEQ ID NO: 44902 - DNA, 30 bp, Artificial Sequence
  Description of Artificial Sequence: Synthetic whey; inner sequence
cgtgatgcgtcacgtcacattcggcctgtc

SEQ ID NO: 44903 - DNA, 30 bp, Artificial Sequence
  Description of Artificial Sequence: Synthetic whey; inner sequence
ggacgcaacttaccgtatcgtggccatgtg

SEQ ID NO: 44904 - DNA, 30 bp, Artificial Sequence; identical to SEQ ID NO: 20553
  Description of Artificial Sequence: Synthetic whey; inner sequence

SEQ ID NO: 44905 - DNA, 30 bp, Artificial Sequence
  Description of Artificial Sequence: Synthetic whey; inner sequence
gtcactgtgcctgaccgtcaagttgccgca

SEQ ID NO: 44906 - DNA, 30 bp, Artificial Sequence; identical to SEQ ID NO: 603
  Description of Artificial Sequence: Synthetic whey; inner sequence

SEQ ID NO: 44907 - DNA, 30 bp, Artificial Sequence
  Description of Artificial Sequence: Synthetic whey; inner sequence
gcacgaatcgcaccctatcatgtaggcatg

SEQ ID NO: 44908 - DNA, 30 bp, Artificial Sequence
  Description of Artificial Sequence: Synthetic whey; inner sequence
acgcaacgacgctacgatacgtgctgtacg

SEQ ID NO: 44909 - DNA, 30 bp, Artificial Sequence; identical to SEQ ID NO: 497
  Description of Artificial Sequence: Synthetic whey; inner sequence

SEQ ID NO: 44910 - DNA, 30 bp, Artificial Sequence
  Description of Artificial Sequence: Synthetic whey; inner sequence
cgtcacgccgaggcacgtccttccgccacg

SEQ ID NO: 44911 - DNA, 30 bp, Artificial Sequence; identical to SEQ ID NO: 905
  Description of Artificial Sequence: Synthetic whey; inner sequence

SEQ ID NO: 44912 - DNA, 30 bp, Artificial Sequence; identical to SEQ ID NO: 956
  Description of Artificial Sequence: Synthetic whey; inner sequence

SEQ ID NO: 44913 - DNA, 30 bp, Artificial Sequence; identical to SEQ ID NO: 28555
  Description of Artificial Sequence: Synthetic whey; inner sequence

SEQ ID NO: 44914 - DNA, 30 bp, Artificial Sequence; identical to SEQ ID NO: 4807
  Description of Artificial Sequence: Synthetic whey; inner sequence

SEQ ID NO: 44915 - DNA, 30 bp, Artificial Sequence; identical to SEQ ID NO: 20343
  Description of Artificial Sequence: Synthetic whey; inner sequence

SEQ ID NO: 44916 - DNA, 30 bp, Artificial Sequence
  Description of Artificial Sequence: Synthetic whey; inner sequence
gtcactgtgcctgaccgtcaagttgcggcc

SEQ ID NO: 44917 - DNA, 30 bp, Artificial Sequence
  Description of Artificial Sequence: Synthetic whey; inner sequence
ggacgcaacgtaccgtatcgttgccatgtg

SEQ ID NO: 44918 - DNA, 30 bp, Artificial Sequence
  Description of Artificial Sequence: Synthetic whey; inner sequence
gtcactgggcctgaccgtcaagttgcggca

SEQ ID NO: 44919 - DNA, 30 bp, Artificial Sequence; identical to SEQ ID NO: 28910
  Description of Artificial Sequence: Synthetic whey; inner sequence

SEQ ID NO: 44920 - DNA, 30 bp, Artificial Sequence
  Description of Artificial Sequence: Synthetic whey; inner sequence
ttacgcatcgtcccgtcatgtggttccgta

SEQ ID NO: 44921 - DNA, 30 bp, Artificial Sequence; identical to SEQ ID NO: 20367
  Description of Artificial Sequence: Synthetic whey; inner sequence

SEQ ID NO: 44922 - DNA, 30 bp, Artificial Sequence
  Description of Artificial Sequence: Synthetic whey; inner sequence
gtcatgccatccctccgagtgtgacaggta

SEQ ID NO: 44923 - DNA, 30 bp, Artificial Sequence
  Description of Artificial Sequence: Synthetic whey; inner sequence
cgtacgcaacgtgcacgactgtcctgtgcc

SEQ ID NO: 44924 - DNA, 30 bp, Artificial Sequence
  Description of Artificial Sequence: Synthetic whey; inner sequence
gcacgactcgcaccctctcatgtaggcatg

SEQ ID NO: 44925 - DNA, 30 bp, Artificial Sequence; identical to SEQ ID NO: 20388
  Description of Artificial Sequence: Synthetic whey; inner sequence

SEQ ID NO: 44926 - DNA, 30 bp, Artificial Sequence
  Description of Artificial Sequence: Synthetic whey; inner sequence
gcactgcacgcaccctctcatgtaggcatg

SEQ ID NO: 44927 - DNA, 30 bp, Artificial Sequence; identical to SEQ ID NO: 12827
  Description of Artificial Sequence: Synthetic whey; inner sequence

SEQ ID NO: 44928 - DNA, 30 bp, Artificial Sequence; identical to SEQ ID NO: 16878
  Description of Artificial Sequence: Synthetic whey; inner sequence

SEQ ID NO: 44929 - DNA, 30 bp, Artificial Sequence; identical to SEQ ID NO: 245
  Description of Artificial Sequence: Synthetic whey; inner sequence

SEQ ID NO: 44930 - DNA, 30 bp, Artificial Sequence; identical to SEQ ID NO: 12767
  Description of Artificial Sequence: Synthetic whey; inner sequence

SEQ ID NO: 44931 - DNA, 30 bp, Artificial Sequence
  Description of Artificial Sequence: Synthetic whey; inner sequence
cgatgcgcagtcaggcataggtacgacaca

SEQ ID NO: 44932 - DNA, 30 bp, Artificial Sequence
  Description of Artificial Sequence: Synthetic whey; inner sequence
cgtgcgcagaacgtgactgtcgtgcttggc

SEQ ID NO: 44933 - DNA, 30 bp, Artificial Sequence; identical to SEQ ID NO: 840
  Description of Artificial Sequence: Synthetic whey; inner sequence

SEQ ID NO: 44934 - DNA, 30 bp, Artificial Sequence
  Description of Artificial Sequence: Synthetic whey; inner sequence
ccatcgcgtcactatcatgtgtgtcactta

SEQ ID NO: 44935 - DNA, 30 bp, Artificial Sequence
  Description of Artificial Sequence: Synthetic whey; inner sequence
ggacgcagcgtaccgttcgagtggtacgta

SEQ ID NO: 44936 - DNA, 30 bp, Artificial Sequence
  Description of Artificial Sequence: Synthetic whey; inner sequence
acgtcacgatgcataacgtccttgtgcgca

SEQ ID NO: 44937 - DNA, 30 bp, Artificial Sequence
  Description of Artificial Sequence: Synthetic whey; inner sequence
ggacgcaacgtaccgtatcatgaggccatg

SEQ ID NO: 44938 - DNA, 30 bp, Artificial Sequence
  Description of Artificial Sequence: Synthetic whey; inner sequence
gtcactttgcctgaccgtcaagttgcggca

SEQ ID NO: 44939 - DNA, 30 bp, Artificial Sequence
  Description of Artificial Sequence: Synthetic whey; inner sequence
ggacgcaacgtaccgtatcgtgaccatgtg

SEQ ID NO: 44940 - DNA, 30 bp, Artificial Sequence; identical to SEQ ID NO: 28195
  Description of Artificial Sequence: Synthetic whey; inner sequence

SEQ ID NO: 44941 - DNA, 30 bp, Artificial Sequence
  Description of Artificial Sequence: Synthetic whey; inner sequence
cgatgcacgatgcgacactgtcacgttgcg

SEQ ID NO: 44942 - DNA, 30 bp, Artificial Sequence
  Description of Artificial Sequence: Synthetic whey; inner sequence
ccatcgcgtcactatcatgtgtgtcatgta

SEQ ID NO: 44943 - DNA, 30 bp, Artificial Sequence; identical to SEQ ID NO: 28818
  Description of Artificial Sequence: Synthetic whey; inner sequence

SEQ ID NO: 44944 - DNA, 30 bp, Artificial Sequence; identical to SEQ ID NO: 20962
  Description of Artificial Sequence: Synthetic whey; inner sequence

SEQ ID NO: 44945 - DNA, 30 bp, Artificial Sequence
  Description of Artificial Sequence: Synthetic whey; inner sequence
ggccacagcgtacctcaacgtggacgtgaa

SEQ ID NO: 44946 - DNA, 30 bp, Artificial Sequence; identical to SEQ ID NO: 159
  Description of Artificial Sequence: Synthetic whey; inner sequence

SEQ ID NO: 44947 - DNA, 30 bp, Artificial Sequence
  Description of Artificial Sequence: Synthetic whey; inner sequence
ggacgcaacgtaacgtatcgtggccatgta

SEQ ID NO: 44948 - DNA, 30 bp, Artificial Sequence; identical to SEQ ID NO: 16692
  Description of Artificial Sequence: Synthetic whey; inner sequence

SEQ ID NO: 44949 - DNA, 30 bp, Artificial Sequence
  Description of Artificial Sequence: Synthetic whey; inner sequence
ccatcgcgtcactgtcatgtgtgtcacgta

SEQ ID NO: 44950 - DNA, 25 bp, Artificial Sequence
  Description of Artificial Sequence: Synthetic whey; inner sequence
ggcatgcacgcacctacacgtgggc

SEQ ID NO: 44951 - DNA, 30 bp, Artificial Sequence
  Description of Artificial Sequence: Synthetic whey; inner sequence
cgtacgcatcgagctgcacgtgtcgtcacg

SEQ ID NO: 44952 - DNA, 30 bp, Artificial Sequence
  Description of Artificial Sequence: Synthetic whey; inner sequence
acgtcacaacctcacgttggctagcgcggt

SEQ ID NO: 44953 - DNA, 30 bp, Artificial Sequence
  Description of Artificial Sequence: Synthetic whey; inner sequence
catgtacgcactgtcaccttgcacgtcacg

SEQ ID NO: 44954 - DNA, 30 bp, Artificial Sequence; identical to SEQ ID NO: 20534
  Description of Artificial Sequence: Synthetic whey; inner sequence

SEQ ID NO: 44955 - DNA, 30 bp, Artificial Sequence; identical to SEQ ID NO: 569
  Description of Artificial Sequence: Synthetic whey; inner sequence

SEQ ID NO: 44956 - DNA, 30 bp, Artificial Sequence
  Description of Artificial Sequence: Synthetic whey; inner sequence
gtcatgccattccttcgagtgtgacaggta

SEQ ID NO: 44957 - DNA, 30 bp, Artificial Sequence; identical to SEQ ID NO: 20807
  Description of Artificial Sequence: Synthetic whey; inner sequence

SEQ ID NO: 44958 - DNA, 30 bp, Artificial Sequence
  Description of Artificial Sequence: Synthetic whey; inner sequence
tgtgacgcacaggaggacgtacgctgcacg

SEQ ID NO: 44959 - DNA, 30 bp, Artificial Sequence; identical to SEQ ID NO: 12936
  Description of Artificial Sequence: Synthetic whey; inner sequence

SEQ ID NO: 44960 - DNA, 30 bp, Artificial Sequence; identical to SEQ ID NO: 32802
  Description of Artificial Sequence: Synthetic whey; inner sequence

SEQ ID NO: 44961 - DNA, 30 bp, Artificial Sequence
  Description of Artificial Sequence: Synthetic whey; inner sequence
ggccacagcgtacctcaacgtggacgcgta

SEQ ID NO: 44962 - DNA, 30 bp, Artificial Sequence; identical to SEQ ID NO: 16408
  Description of Artificial Sequence: Synthetic whey; inner sequence

SEQ ID NO: 44963 - DNA, 30 bp, Artificial Sequence
  Description of Artificial Sequence: Synthetic whey; inner sequence
gtacgcatcgtcccgtcatgtggttccgtc

SEQ ID NO: 44964 - DNA, 30 bp, Artificial Sequence; identical to SEQ ID NO: 147
  Description of Artificial Sequence: Synthetic whey; inner sequence

SEQ ID NO: 44965 - DNA, 30 bp, Artificial Sequence; identical to SEQ ID NO: 8769
  Description of Artificial Sequence: Synthetic whey; inner sequence

SEQ ID NO: 44966 - DNA, 30 bp, Artificial Sequence
  Description of Artificial Sequence: Synthetic whey; inner sequence
cacgtcaggcagatggacgcatacgacacg

SEQ ID NO: 44967 - DNA, 30 bp, Artificial Sequence
  Description of Artificial Sequence: Synthetic whey; inner sequence
gcacgactcgcacactatcatgtaggcatg

SEQ ID NO: 44968 - DNA, 30 bp, Artificial Sequence; identical to SEQ ID NO: 16803
  Description of Artificial Sequence: Synthetic whey; inner sequence

SEQ ID NO: 44969 - DNA, 30 bp, Artificial Sequence; identical to SEQ ID NO: 101
  Description of Artificial Sequence: Synthetic whey; inner sequence

SEQ ID NO: 44970 - DNA, 30 bp, Artificial Sequence
  Description of Artificial Sequence: Synthetic whey; inner sequence
gtacgcatcgtccagtcatgtggttccgta

SEQ ID NO: 44971 - DNA, 30 bp, Artificial Sequence
  Description of Artificial Sequence: Synthetic whey; inner sequence
gcacgactcgcaccctgtcatgaggccatg

SEQ ID NO: 44972 - DNA, 30 bp, Artificial Sequence
  Description of Artificial Sequence: Synthetic whey; inner sequence
gcgtcacacagcagcgtgttacgtcctgcc

SEQ ID NO: 44973 - DNA, 30 bp, Artificial Sequence; identical to SEQ ID NO: 32484
  Description of Artificial Sequence: Synthetic whey; inner sequence

SEQ ID NO: 44974 - DNA, 30 bp, Artificial Sequence; identical to SEQ ID NO: 91
  Description of Artificial Sequence: Synthetic whey; inner sequence

SEQ ID NO: 44975 - DNA, 30 bp, Artificial Sequence
  Description of Artificial Sequence: Synthetic whey; inner sequence
gtcattccgcatcccacacgtgggcacgta

SEQ ID NO: 44976 - DNA, 30 bp, Artificial Sequence; identical to SEQ ID NO: 28744
  Description of Artificial Sequence: Synthetic whey; inner sequence

SEQ ID NO: 44977 - DNA, 30 bp, Artificial Sequence
  Description of Artificial Sequence: Synthetic whey; inner sequence
cgtggcacgtcacgcatgatgcacttcggt

SEQ ID NO: 44978 - DNA, 30 bp, Artificial Sequence
  Description of Artificial Sequence: Synthetic whey; inner sequence
cgtgatggcgaacgtgtactgcgacatgcc

SEQ ID NO: 44979 - DNA, 30 bp, Artificial Sequence
  Description of Artificial Sequence: Synthetic whey; inner sequence
gtcacgccatcccttcgagtgtgacaggta

SEQ ID NO: 44980 - DNA, 30 bp, Artificial Sequence; identical to SEQ ID NO: 653
  Description of Artificial Sequence: Synthetic whey; inner sequence

SEQ ID NO: 44981 - DNA, 30 bp, Artificial Sequence
  Description of Artificial Sequence: Synthetic whey; inner sequence
gtcatgcaatcccttcgagtgtgacaggta

SEQ ID NO: 44982 - DNA, 30 bp, Artificial Sequence
  Description of Artificial Sequence: Synthetic whey; inner sequence
gtcatcccatcccttcgagtgtgacaggta

SEQ ID NO: 44983 - DNA, 30 bp, Artificial Sequence
  Description of Artificial Sequence: Synthetic whey; inner sequence
gcacgcaacgtaccgtatcgtggccatgtg

SEQ ID NO: 44984 - DNA, 30 bp, Artificial Sequence; identical to SEQ ID NO: 448
  Description of Artificial Sequence: Synthetic whey; inner sequence

SEQ ID NO: 44985 - DNA, 30 bp, Artificial Sequence
  Description of Artificial Sequence: Synthetic whey; inner sequence
ggacgcaacgtaccgtcatgtggttccgta

SEQ ID NO: 44986 - DNA, 30 bp, Artificial Sequence; identical to SEQ ID NO: 20574
  Description of Artificial Sequence: Synthetic whey; inner sequence

SEQ ID NO: 44987 - DNA, 30 bp, Artificial Sequence; identical to SEQ ID NO: 16695
  Description of Artificial Sequence: Synthetic whey; inner sequence

SEQ ID NO: 44988 - DNA, 30 bp, Artificial Sequence; identical to SEQ ID NO: 102
  Description of Artificial Sequence: Synthetic whey; inner sequence

SEQ ID NO: 44989 - DNA, 30 bp, Artificial Sequence
  Description of Artificial Sequence: Synthetic whey; inner sequence
cgtgcaacgcgagctgcgacgtacgacacg

SEQ ID NO: 44990 - DNA, 30 bp, Artificial Sequence; identical to SEQ ID NO: 788
  Description of Artificial Sequence: Synthetic whey; inner sequence

SEQ ID NO: 44991 - DNA, 30 bp, Artificial Sequence
  Description of Artificial Sequence: Synthetic whey; inner sequence
ggacgcaacgtaccgtatcgtggctatgtg

SEQ ID NO: 44992 - DNA, 30 bp, Artificial Sequence
  Description of Artificial Sequence: Synthetic whey; inner sequence
gtcactgtgcctgaccatcaagttgcggca

SEQ ID NO: 44993 - DNA, 30 bp, Artificial Sequence
  Description of Artificial Sequence: Synthetic whey; inner sequence
gcaacgcgaggacgtactgctgcctacacg

SEQ ID NO: 44994 - DNA, 30 bp, Artificial Sequence
  Description of Artificial Sequence: Synthetic whey; inner sequence
gcgctaggcgtgacgtacacatgctgcacg

SEQ ID NO: 44995 - DNA, 30 bp, Artificial Sequence; identical to SEQ ID NO: 8763
  Description of Artificial Sequence: Synthetic whey; inner sequence

SEQ ID NO: 44996 - DNA, 30 bp, Artificial Sequence
  Description of Artificial Sequence: Synthetic whey; inner sequence
cacgtacagtgaggcgtacctgcatgcgca

SEQ ID NO: 44997 - DNA, 30 bp, Artificial Sequence
  Description of Artificial Sequence: Synthetic whey; inner sequence
cgacatgagcacggtatgcctcactgcacg

SEQ ID NO: 44998 - DNA, 30 bp, Artificial Sequence
  Description of Artificial Sequence: Synthetic whey; inner sequence
cgtgcacgaggacgacgaacgcactacgca

SEQ ID NO: 44999 - DNA, 30 bp, Artificial Sequence
  Description of Artificial Sequence: Synthetic whey; inner sequence
agccacagcgtacctcaacgtggacgtgca

SEQ ID NO: 45000 - DNA, 30 bp, Artificial Sequence
  Description of Artificial Sequence: Synthetic whey; inner sequence
tcgacggcaaggtgaggcacgtgcatcgcg

SEQ ID NO: 45001 - DNA, 30 bp, Artificial Sequence
  Description of Artificial Sequence: Synthetic whey; inner sequence
ggactcaacgtaccgtatcgtggccatgta

SEQ ID NO: 45002 - DNA, 30 bp, Artificial Sequence; identical to SEQ ID NO: 32341
  Description of Artificial Sequence: Synthetic whey; inner sequence

SEQ ID NO: 45003 - DNA, 53 bp, Artificial Sequence; identical to SEQ ID NO: 1004
  Description of Artificial Sequence: Synthetic whey; 5' sequence and inner sequence

SEQ ID NO: 45004 - DNA, 53 bp, Artificial Sequence; identical to SEQ ID NO: 1021
  Description of Artificial Sequence: Synthetic whey; 5' sequence and inner sequence

SEQ ID NO: 45005 - DNA, 53 bp, Artificial Sequence; identical to SEQ ID NO: 1009
  Description of Artificial Sequence: Synthetic whey; 5' sequence and inner sequence

SEQ ID NO: 45006 - DNA, 53 bp, Artificial Sequence; identical to SEQ ID NO: 1008
  Description of Artificial Sequence: Synthetic whey; 5' sequence and inner sequence

SEQ ID NO: 45007 - DNA, 53 bp, Artificial Sequence; identical to SEQ ID NO: 1006
  Description of Artificial Sequence: Synthetic whey; 5' sequence and inner sequence

SEQ ID NO: 45008 - DNA, 53 bp, Artificial Sequence; identical to SEQ ID NO: 1020
  Description of Artificial Sequence: Synthetic whey; 5' sequence and inner sequence

SEQ ID NO: 45009 - DNA, 53 bp, Artificial Sequence; identical to SEQ ID NO: 1011
  Description of Artificial Sequence: Synthetic whey; 5' sequence and inner sequence

SEQ ID NO: 45010 - DNA, 53 bp, Artificial Sequence; identical to SEQ ID NO: 1003
  Description of Artificial Sequence: Synthetic whey; 5' sequence and inner sequence

SEQ ID NO: 45011 - DNA, 53 bp, Artificial Sequence; identical to SEQ ID NO: 1007
  Description of Artificial Sequence: Synthetic whey; 5' sequence and inner sequence

SEQ ID NO: 45012 - DNA, 53 bp, Artificial Sequence; identical to SEQ ID NO: 1052
  Description of Artificial Sequence: Synthetic whey; 5' sequence and inner sequence

SEQ ID NO: 45013 - DNA, 53 bp, Artificial Sequence; identical to SEQ ID NO: 1005
  Description of Artificial Sequence: Synthetic whey; 5' sequence and inner sequence

SEQ ID NO: 45014 - DNA, 53 bp, Artificial Sequence; identical to SEQ ID NO: 1028
  Description of Artificial Sequence: Synthetic whey; 5' sequence and inner sequence

SEQ ID NO: 45015 - DNA, 53 bp, Artificial Sequence; identical to SEQ ID NO: 1010
  Description of Artificial Sequence: Synthetic whey; 5' sequence and inner sequence

SEQ ID NO: 45016 - DNA, 53 bp, Artificial Sequence; identical to SEQ ID NO: 1014
  Description of Artificial Sequence: Synthetic whey; 5' sequence and inner sequence

SEQ ID NO: 45017 - DNA, 53 bp, Artificial Sequence; identical to SEQ ID NO: 1081
  Description of Artificial Sequence: Synthetic whey; 5' sequence and inner sequence

SEQ ID NO: 45018 - DNA, 53 bp, Artificial Sequence; identical to SEQ ID NO: 1201
  Description of Artificial Sequence: Synthetic whey; 5' sequence and inner sequence

SEQ ID NO: 45019 - DNA, 53 bp, Artificial Sequence; identical to SEQ ID NO: 1033
  Description of Artificial Sequence: Synthetic whey; 5' sequence and inner sequence

SEQ ID NO: 45020 - DNA, 53 bp, Artificial Sequence; identical to SEQ ID NO: 1040
  Description of Artificial Sequence: Synthetic whey; 5' sequence and inner sequence

SEQ ID NO: 45021 - DNA, 53 bp, Artificial Sequence; identical to SEQ ID NO: 1220
  Description of Artificial Sequence: Synthetic whey; 5' sequence and inner sequence

SEQ ID NO: 45022 - DNA, 51 bp, Artificial Sequence; identical to SEQ ID NO: 1241
  Description of Artificial Sequence: Synthetic whey; 5' sequence and inner sequence

SEQ ID NO: 45023 - DNA, 53 bp, Artificial Sequence; identical to SEQ ID NO: 1458
  Description of Artificial Sequence: Synthetic whey; 5' sequence and inner sequence

SEQ ID NO: 45024 - DNA, 53 bp, Artificial Sequence; identical to SEQ ID NO: 17640
  Description of Artificial Sequence: Synthetic whey; 5' sequence and inner sequence

SEQ ID NO: 45025 - DNA, 53 bp, Artificial Sequence; identical to SEQ ID NO: 1030
  Description of Artificial Sequence: Synthetic whey; 5' sequence and inner sequence

SEQ ID NO: 45026 - DNA, 53 bp, Artificial Sequence; identical to SEQ ID NO: 1046
  Description of Artificial Sequence: Synthetic whey; 5' sequence and inner sequence

SEQ ID NO: 45027 - DNA, 53 bp, Artificial Sequence; identical to SEQ ID NO: 1012
  Description of Artificial Sequence: Synthetic whey; 5' sequence and inner sequence

SEQ ID NO: 45028 - DNA, 53 bp, Artificial Sequence; identical to SEQ ID NO: 1036
  Description of Artificial Sequence: Synthetic whey; 5' sequence and inner sequence

SEQ ID NO: 45029 - DNA, 53 bp, Artificial Sequence; identical to SEQ ID NO: 1078
  Description of Artificial Sequence: Synthetic whey; 5' sequence and inner sequence

SEQ ID NO: 45030 - DNA, 53 bp, Artificial Sequence; identical to SEQ ID NO: 1279
  Description of Artificial Sequence: Synthetic whey; 5' sequence and inner sequence

SEQ ID NO: 45031 - DNA, 53 bp, Artificial Sequence; identical to SEQ ID NO: 1491
  Description of Artificial Sequence: Synthetic whey; 5' sequence and inner sequence

SEQ ID NO: 45032 - DNA, 53 bp, Artificial Sequence; identical to SEQ ID NO: 1108
  Description of Artificial Sequence: Synthetic whey; 5' sequence and inner sequence

SEQ ID NO: 45033 - DNA, 53 bp, Artificial Sequence; identical to SEQ ID NO: 21468
  Description of Artificial Sequence: Synthetic whey; 5' sequence and inner sequence

SEQ ID NO: 45034 - DNA, 53 bp, Artificial Sequence; identical to SEQ ID NO: 1115
  Description of Artificial Sequence: Synthetic whey; 5' sequence and inner sequence

SEQ ID NO: 45035 - DNA, 53 bp, Artificial Sequence; identical to SEQ ID NO: 21466
  Description of Artificial Sequence: Synthetic whey; 5' sequence and inner sequence

SEQ ID NO: 45036 - DNA, 53 bp, Artificial Sequence; identical to SEQ ID NO: 1063
  Description of Artificial Sequence: Synthetic whey; 5' sequence and inner sequence

SEQ ID NO: 45037 - DNA, 53 bp, Artificial Sequence; identical to SEQ ID NO: 1526
  Description of Artificial Sequence: Synthetic whey; 5' sequence and inner sequence

SEQ ID NO: 45038 - DNA, 53 bp, Artificial Sequence; identical to SEQ ID NO: 1015
  Description of Artificial Sequence: Synthetic whey; 5' sequence and inner sequence

SEQ ID NO: 45039 - DNA, 53 bp, Artificial Sequence; identical to SEQ ID NO: 17266
  Description of Artificial Sequence: Synthetic whey; 5' sequence and inner sequence

SEQ ID NO: 45040 - DNA, 53 bp, Artificial Sequence; identical to SEQ ID NO: 1023
  Description of Artificial Sequence: Synthetic whey; 5' sequence and inner sequence

SEQ ID NO: 45041 - DNA, 53 bp, Artificial Sequence; identical to SEQ ID NO: 1323
  Description of Artificial Sequence: Synthetic whey; 5' sequence and inner sequence

SEQ ID NO: 45042 - DNA, 53 bp, Artificial Sequence; identical to SEQ ID NO: 1071
  Description of Artificial Sequence: Synthetic whey; 5' sequence and inner sequence

SEQ ID NO: 45043 - DNA, 53 bp, Artificial Sequence; identical to SEQ ID NO: 1018
  Description of Artificial Sequence: Synthetic whey; 5' sequence and inner sequence

SEQ ID NO: 45044 - DNA, 53 bp, Artificial Sequence; identical to SEQ ID NO: 1506
  Description of Artificial Sequence: Synthetic whey; 5' sequence and inner sequence

SEQ ID NO: 45045 - DNA, 53 bp, Artificial Sequence; identical to SEQ ID NO: 1340
  Description of Artificial Sequence: Synthetic whey; 5' sequence and inner sequence

SEQ ID NO: 45046 - DNA, 53 bp, Artificial Sequence; identical to SEQ ID NO: 1145
  Description of Artificial Sequence: Synthetic whey; 5' sequence and inner sequence

SEQ ID NO: 45047 - DNA, 53 bp, Artificial Sequence; identical to SEQ ID NO: 29208
  Description of Artificial Sequence: Synthetic whey; 5' sequence and inner sequence

SEQ ID NO: 45048 - DNA, 53 bp, Artificial Sequence; identical to SEQ ID NO: 1066
  Description of Artificial Sequence: Synthetic whey; 5' sequence and inner sequence

SEQ ID NO: 45049 - DNA, 53 bp, Artificial Sequence; identical to SEQ ID NO: 1110
  Description of Artificial Sequence: Synthetic whey; 5' sequence and inner sequence

SEQ ID NO: 45050 - DNA, 53 bp, Artificial Sequence; identical to SEQ ID NO: 1131
  Description of Artificial Sequence: Synthetic whey; 5' sequence and inner sequence

SEQ ID NO: 45051 - DNA, 53 bp, Artificial Sequence; identical to SEQ ID NO: 1035
  Description of Artificial Sequence: Synthetic whey; 5' sequence and inner sequence

SEQ ID NO: 45052 - DNA, 53 bp, Artificial Sequence; identical to SEQ ID NO: 1045
  Description of Artificial Sequence: Synthetic whey; 5' sequence and inner sequence

SEQ ID NO: 45053 - DNA, 53 bp, Artificial Sequence; identical to SEQ ID NO: 17819
  Description of Artificial Sequence: Synthetic whey; 5' sequence and inner sequence

SEQ ID NO: 45054 - DNA, 53 bp, Artificial Sequence; identical to SEQ ID NO: 1369
  Description of Artificial Sequence: Synthetic whey; 5' sequence and inner sequence

SEQ ID NO: 45055 - DNA, 53 bp, Artificial Sequence; identical to SEQ ID NO: 1022
  Description of Artificial Sequence: Synthetic whey; 5' sequence and inner sequence

SEQ ID NO: 45056 - DNA, 53 bp, Artificial Sequence; identical to SEQ ID NO: 29199
  Description of Artificial Sequence: Synthetic whey; 5' sequence and inner sequence

SEQ ID NO: 45057 - DNA, 53 bp, Artificial Sequence; identical to SEQ ID NO: 1121
  Description of Artificial Sequence: Synthetic whey; 5' sequence and inner sequence

SEQ ID NO: 45058 - DNA, 53 bp, Artificial Sequence; identical to SEQ ID NO: 1454
  Description of Artificial Sequence: Synthetic whey; 5' sequence and inner sequence

SEQ ID NO: 45059 - DNA, 53 bp, Artificial Sequence; identical to SEQ ID NO: 17818
  Description of Artificial Sequence: Synthetic whey; 5' sequence and inner sequence

SEQ ID NO: 45060 - DNA, 53 bp, Artificial Sequence; identical to SEQ ID NO: 1381
  Description of Artificial Sequence: Synthetic whey; 5' sequence and inner sequence

SEQ ID NO: 45061 - DNA, 53 bp, Artificial Sequence; identical to SEQ ID NO: 1079
  Description of Artificial Sequence: Synthetic whey; 5' sequence and inner sequence

SEQ ID NO: 45062 - DNA, 53 bp, Artificial Sequence; identical to SEQ ID NO: 1037
  Description of Artificial Sequence: Synthetic whey; 5' sequence and inner sequence

SEQ ID NO: 45063 - DNA, 54 bp, Artificial Sequence; identical to SEQ ID NO: 17373
  Description of Artificial Sequence: Synthetic whey; 5' sequence and inner sequence

SEQ ID NO: 45064 - DNA, 53 bp, Artificial Sequence; identical to SEQ ID NO: 29252
  Description of Artificial Sequence: Synthetic whey; 5' sequence and inner sequence

SEQ ID NO: 45065 - DNA, 53 bp, Artificial Sequence; identical to SEQ ID NO: 1086
  Description of Artificial Sequence: Synthetic whey; 5' sequence and inner sequence

SEQ ID NO: 45066 - DNA, 53 bp, Artificial Sequence; identical to SEQ ID NO: 1051
  Description of Artificial Sequence: Synthetic whey; 5' sequence and inner sequence

SEQ ID NO: 45067 - DNA, 53 bp, Artificial Sequence; identical to SEQ ID NO: 1041
  Description of Artificial Sequence: Synthetic whey; 5' sequence and inner sequence

SEQ ID NO: 45068 - DNA, 53 bp, Artificial Sequence; identical to SEQ ID NO: 1016
  Description of Artificial Sequence: Synthetic whey; 5' sequence and inner sequence

SEQ ID NO: 45069 - DNA, 53 bp, Artificial Sequence; identical to SEQ ID NO: 21495
  Description of Artificial Sequence: Synthetic whey; 5' sequence and inner sequence

SEQ ID NO: 45070 - DNA, 53 bp, Artificial Sequence; identical to SEQ ID NO: 1077
  Description of Artificial Sequence: Synthetic whey; 5' sequence and inner sequence

SEQ ID NO: 45071 - DNA, 53 bp, Artificial Sequence; identical to SEQ ID NO: 1013
  Description of Artificial Sequence: Synthetic whey; 5' sequence and inner sequence

SEQ ID NO: 45072 - DNA, 53 bp, Artificial Sequence; identical to SEQ ID NO: 29243
  Description of Artificial Sequence: Synthetic whey; 5' sequence and inner sequence

SEQ ID NO: 45073 - DNA, 53 bp, Artificial Sequence; identical to SEQ ID NO: 5659
  Description of Artificial Sequence: Synthetic whey; 5' sequence and inner sequence

SEQ ID NO: 45074 - DNA, 53 bp, Artificial Sequence; identical to SEQ ID NO: 1017
  Description of Artificial Sequence: Synthetic whey; 5' sequence and inner sequence

SEQ ID NO: 45075 - DNA, 53 bp, Artificial Sequence; identical to SEQ ID NO: 1025
  Description of Artificial Sequence: Synthetic whey; 5' sequence and inner sequence

SEQ ID NO: 45076 - DNA, 53 bp, Artificial Sequence; identical to SEQ ID NO: 29743
  Description of Artificial Sequence: Synthetic whey; 5' sequence and inner sequence

SEQ ID NO: 45077 - DNA, 53 bp, Artificial Sequence; identical to SEQ ID NO: 1117
  Description of Artificial Sequence: Synthetic whey; 5' sequence and inner sequence

SEQ ID NO: 45078 - DNA, 53 bp, Artificial Sequence; identical to SEQ ID NO: 1138
  Description of Artificial Sequence: Synthetic whey; 5' sequence and inner sequence

SEQ ID NO: 45079 - DNA, 53 bp, Artificial Sequence; identical to SEQ ID NO: 1217
  Description of Artificial Sequence: Synthetic whey; 5' sequence and inner sequence

SEQ ID NO: 45080 - DNA, 53 bp, Artificial Sequence; identical to SEQ ID NO: 21504
  Description of Artificial Sequence: Synthetic whey; 5' sequence and inner sequence

SEQ ID NO: 45081 - DNA, 53 bp, Artificial Sequence; identical to SEQ ID NO: 29310
  Description of Artificial Sequence: Synthetic whey; 5' sequence and inner sequence

SEQ ID NO: 45082 - DNA, 53 bp, Artificial Sequence; identical to SEQ ID NO: 1243
  Description of Artificial Sequence: Synthetic whey; 5' sequence and inner sequence

SEQ ID NO: 45083 - DNA, 53 bp, Artificial Sequence; identical to SEQ ID NO: 1174
  Description of Artificial Sequence: Synthetic whey; 5' sequence and inner sequence

SEQ ID NO: 45084 - DNA, 53 bp, Artificial Sequence; identical to SEQ ID NO: 1697
  Description of Artificial Sequence: Synthetic whey; 5' sequence and inner sequence

SEQ ID NO: 45085 - DNA, 53 bp, Artificial Sequence; identical to SEQ ID NO: 1027
  Description of Artificial Sequence: Synthetic whey; 5' sequence and inner sequence

SEQ ID NO: 45086 - DNA, 53 bp, Artificial Sequence; identical to SEQ ID NO: 1344
  Description of Artificial Sequence: Synthetic whey; 5' sequence and inner sequence

SEQ ID NO: 45087 - DNA, 53 bp, Artificial Sequence; identical to SEQ ID NO: 1049
  Description of Artificial Sequence: Synthetic whey; 5' sequence and inner sequence

SEQ ID NO: 45088 - DNA, 53 bp, Artificial Sequence; identical to SEQ ID NO: 1194
  Description of Artificial Sequence: Synthetic whey; 5' sequence and inner sequence

SEQ ID NO: 45089 - DNA, 53 bp, Artificial Sequence; identical to SEQ ID NO: 1372
  Description of Artificial Sequence: Synthetic whey; 5' sequence and inner sequence

SEQ ID NO: 45090 - DNA, 53 bp, Artificial Sequence; identical to SEQ ID NO: 17603
  Description of Artificial Sequence: Synthetic whey; 5' sequence and inner sequence

SEQ ID NO: 45091 - DNA, 53 bp, Artificial Sequence; identical to SEQ ID NO: 29477
  Description of Artificial Sequence: Synthetic whey; 5' sequence and inner sequence

SEQ ID NO: 45092 - DNA, 53 bp, Artificial Sequence; identical to SEQ ID NO: 1184
  Description of Artificial Sequence: Synthetic whey; 5' sequence and inner sequence

SEQ ID NO: 45093 - DNA, 53 bp, Artificial Sequence; identical to SEQ ID NO: 1290
  Description of Artificial Sequence: Synthetic whey; 5' sequence and inner sequence

SEQ ID NO: 45094 - DNA, 53 bp, Artificial Sequence; identical to SEQ ID NO: 1249
  Description of Artificial Sequence: Synthetic whey; 5' sequence and inner sequence

SEQ ID NO: 45095 - DNA, 53 bp, Artificial Sequence; identical to SEQ ID NO: 21540
  Description of Artificial Sequence: Synthetic whey; 5' sequence and inner sequence

SEQ ID NO: 45096 - DNA, 53 bp, Artificial Sequence; identical to SEQ ID NO: 21105
  Description of Artificial Sequence: Synthetic whey; 5' sequence and inner sequence

SEQ ID NO: 45097 - DNA, 53 bp, Artificial Sequence; identical to SEQ ID NO: 1228
  Description of Artificial Sequence: Synthetic whey; 5' sequence and inner sequence

SEQ ID NO: 45098 - DNA, 53 bp, Artificial Sequence; identical to SEQ ID NO: 1019
  Description of Artificial Sequence: Synthetic whey; 5' sequence and inner sequence

SEQ ID NO: 45099 - DNA, 53 bp, Artificial Sequence; identical to SEQ ID NO: 1281
  Description of Artificial Sequence: Synthetic whey; 5' sequence and inner sequence

SEQ ID NO: 45100 - DNA, 53 bp, Artificial Sequence; identical to SEQ ID NO: 21486
  Description of Artificial Sequence: Synthetic whey; 5' sequence and inner sequence

SEQ ID NO: 45101 - DNA, 53 bp, Artificial Sequence; identical to SEQ ID NO: 1053
  Description of Artificial Sequence: Synthetic whey; 5' sequence and inner sequence

SEQ ID NO: 45102 - DNA, 53 bp, Artificial Sequence; identical to SEQ ID NO: 1442
  Description of Artificial Sequence: Synthetic whey; 5' sequence and inner sequence

SEQ ID NO: 45103 - DNA, 53 bp, Artificial Sequence; identical to SEQ ID NO: 1072
  Description of Artificial Sequence: Synthetic whey; 5' sequence and inner sequence

SEQ ID NO: 45104 - DNA, 53 bp, Artificial Sequence; identical to SEQ ID NO: 1283
  Description of Artificial Sequence: Synthetic whey; 5' sequence and inner sequence

SEQ ID NO: 45105 - DNA, 53 bp, Artificial Sequence; identical to SEQ ID NO: 1123
  Description of Artificial Sequence: Synthetic whey; 5' sequence and inner sequence

SEQ ID NO: 45106 - DNA, 53 bp, Artificial Sequence; identical to SEQ ID NO: 13997
  Description of Artificial Sequence: Synthetic whey; 5' sequence and inner sequence

SEQ ID NO: 45107 - DNA, 53 bp, Artificial Sequence; identical to SEQ ID NO: 1776
  Description of Artificial Sequence: Synthetic whey; 5' sequence and inner sequence

SEQ ID NO: 45108 - DNA, 54 bp, Artificial Sequence; identical to SEQ ID NO: 1971
  Description of Artificial Sequence: Synthetic whey; 5' sequence and inner sequence

SEQ ID NO: 45109 - DNA, 53 bp, Artificial Sequence; identical to SEQ ID NO: 29379
  Description of Artificial Sequence: Synthetic whey; 5' sequence and inner sequence

SEQ ID NO: 45110 - DNA, 53 bp, Artificial Sequence; identical to SEQ ID NO: 1232
  Description of Artificial Sequence: Synthetic whey; 5' sequence and inner sequence

SEQ ID NO: 45111 - DNA, 53 bp, Artificial Sequence
  Description of Artificial Sequence: Synthetic whey; 5' sequence and inner sequence
tagggaagagaaggacatatgatgtcactgtgcctgaccttcaagttgcggca

SEQ ID NO: 45112 - DNA, 53 bp, Artificial Sequence
  Description of Artificial Sequence: Synthetic whey; 5' sequence and inner sequence
tagggaagagaaggacatatgatgcacgactcgcaccctatcatgttggcatg

SEQ ID NO: 45113 - DNA, 53 bp, Artificial Sequence; identical to SEQ ID NO: 1073
  Description of Artificial Sequence: Synthetic whey; 5' sequence and inner sequence

SEQ ID NO: 45114 - DNA, 53 bp, Artificial Sequence; identical to SEQ ID NO: 21524
  Description of Artificial Sequence: Synthetic whey; 5' sequence and inner sequence

SEQ ID NO: 45115 - DNA, 53 bp, Artificial Sequence; identical to SEQ ID NO: 5336
  Description of Artificial Sequence: Synthetic whey; 5' sequence and inner sequence

SEQ ID NO: 45116 - DNA, 53 bp, Artificial Sequence
  Description of Artificial Sequence: Synthetic whey; 5' sequence and inner sequence
tagggaagagaaggacatatgatacgacaacgcgatgacgtacgtacgatgtg

SEQ ID NO: 45117 - DNA, 53 bp, Artificial Sequence; identical to SEQ ID NO: 29735
  Description of Artificial Sequence: Synthetic whey; 5' sequence and inner sequence

SEQ ID NO: 45118 - DNA, 53 bp, Artificial Sequence; identical to SEQ ID NO: 17211
  Description of Artificial Sequence: Synthetic whey; 5' sequence and inner sequence

SEQ ID NO: 45119 - DNA, 53 bp, Artificial Sequence; identical to SEQ ID NO: 1613
  Description of Artificial Sequence: Synthetic whey; 5' sequence and inner sequence

SEQ ID NO: 45120 - DNA, 53 bp, Artificial Sequence; identical to SEQ ID NO: 1031
  Description of Artificial Sequence: Synthetic whey; 5' sequence and inner sequence

SEQ ID NO: 45121 - DNA, 53 bp, Artificial Sequence; identical to SEQ ID NO: 1343
  Description of Artificial Sequence: Synthetic whey; 5' sequence and inner sequence

SEQ ID NO: 45122 - DNA, 53 bp, Artificial Sequence; identical to SEQ ID NO: 1047
  Description of Artificial Sequence: Synthetic whey; 5' sequence and inner sequence

SEQ ID NO: 45123 - DNA, 53 bp, Artificial Sequence; identical to SEQ ID NO: 1684
  Description of Artificial Sequence: Synthetic whey; 5' sequence and inner sequence

SEQ ID NO: 45124 - DNA, 53 bp, Artificial Sequence; identical to SEQ ID NO: 1212
  Description of Artificial Sequence: Synthetic whey; 5' sequence and inner sequence

SEQ ID NO: 45125 - DNA, 53 bp, Artificial Sequence; identical to SEQ ID NO: 29436
  Description of Artificial Sequence: Synthetic whey; 5' sequence and inner sequence

SEQ ID NO: 45126 - DNA, 53 bp, Artificial Sequence; identical to SEQ ID NO: 9946
  Description of Artificial Sequence: Synthetic whey; 5' sequence and inner sequence

SEQ ID NO: 45127 - DNA, 53 bp, Artificial Sequence
  Description of Artificial Sequence: Synthetic whey; 5' sequence and inner sequence
tagggaagagaaggacatatgatacgtcacgatgcacaagggcgtgctgcacg

SEQ ID NO: 45128 - DNA, 53 bp, Artificial Sequence; identical to SEQ ID NO: 1467
  Description of Artificial Sequence: Synthetic whey; 5' sequence and inner sequence

SEQ ID NO: 45129 - DNA, 53 bp, Artificial Sequence; identical to SEQ ID NO: 1067
  Description of Artificial Sequence: Synthetic whey; 5' sequence and inner sequence

SEQ ID NO: 45130 - DNA, 53 bp, Artificial Sequence; identical to SEQ ID NO: 29315
  Description of Artificial Sequence: Synthetic whey; 5' sequence and inner sequence

SEQ ID NO: 45131 - DNA, 53 bp, Artificial Sequence; identical to SEQ ID NO: 29985
  Description of Artificial Sequence: Synthetic whey; 5' sequence and inner sequence

SEQ ID NO: 45132 - DNA, 53 bp, Artificial Sequence; identical to SEQ ID NO: 1172
  Description of Artificial Sequence: Synthetic whey; 5' sequence and inner sequence

SEQ ID NO: 45133 - DNA, 53 bp, Artificial Sequence
  Description of Artificial Sequence: Synthetic whey; 5' sequence and inner sequence
tagggaagagaaggacatatgatgtacgcatcgtcccgtcatgtggttgtgga

SEQ ID NO: 45134 - DNA, 53 bp, Artificial Sequence; identical to SEQ ID NO: 1272
  Description of Artificial Sequence: Synthetic whey; 5' sequence and inner sequence

SEQ ID NO: 45135 - DNA, 53 bp, Artificial Sequence; identical to SEQ ID NO: 1359
  Description of Artificial Sequence: Synthetic whey; 5' sequence and inner sequence

SEQ ID NO: 45136 - DNA, 53 bp, Artificial Sequence; identical to SEQ ID NO: 1886
  Description of Artificial Sequence: Synthetic whey; 5' sequence and inner sequence

SEQ ID NO: 45137 - DNA, 53 bp, Artificial Sequence; identical to SEQ ID NO: 1229
  Description of Artificial Sequence: Synthetic whey; 5' sequence and inner sequence

SEQ ID NO: 45138 - DNA, 53 bp, Artificial Sequence; identical to SEQ ID NO: 1379
  Description of Artificial Sequence: Synthetic whey; 5' sequence and inner sequence

SEQ ID NO: 45139 - DNA, 53 bp, Artificial Sequence; identical to SEQ ID NO: 29471
  Description of Artificial Sequence: Synthetic whey; 5' sequence and inner sequence

SEQ ID NO: 45140 - DNA, 53 bp, Artificial Sequence
  Description of Artificial Sequence: Synthetic whey; 5' sequence and inner sequence
tagggaagagaaggacatatgatacgtcacacgtcgagttacgctacgacacg

SEQ ID NO: 45141 - DNA, 53 bp, Artificial Sequence; identical to SEQ ID NO: 29244
  Description of Artificial Sequence: Synthetic whey; 5' sequence and inner sequence

SEQ ID NO: 45142 - DNA, 53 bp, Artificial Sequence; identical to SEQ ID NO: 13775
  Description of Artificial Sequence: Synthetic whey; 5' sequence and inner sequence

SEQ ID NO: 45143 - DNA, 53 bp, Artificial Sequence; identical to SEQ ID NO: 1061
  Description of Artificial Sequence: Synthetic whey; 5' sequence and inner sequence

SEQ ID NO: 45144 - DNA, 53 bp, Artificial Sequence; identical to SEQ ID NO: 1029
  Description of Artificial Sequence: Synthetic whey; 5' sequence and inner sequence

SEQ ID NO: 45145 - DNA, 53 bp, Artificial Sequence; identical to SEQ ID NO: 29108
  Description of Artificial Sequence: Synthetic whey; 5' sequence and inner sequence

SEQ ID NO: 45146 - DNA, 53 bp, Artificial Sequence; identical to SEQ ID NO: 1611
  Description of Artificial Sequence: Synthetic whey; 5' sequence and inner sequence

SEQ ID NO: 45147 - DNA, 53 bp, Artificial Sequence; identical to SEQ ID NO: 1457
  Description of Artificial Sequence: Synthetic whey; 5' sequence and inner sequence

SEQ ID NO: 45148 - DNA, 53 bp, Artificial Sequence; identical to SEQ ID NO: 1178
  Description of Artificial Sequence: Synthetic whey; 5' sequence and inner sequence

SEQ ID NO: 45149 - DNA, 53 bp, Artificial Sequence; identical to SEQ ID NO: 1746
  Description of Artificial Sequence: Synthetic whey; 5' sequence and inner sequence

SEQ ID NO: 45150 - DNA, 53 bp, Artificial Sequence; identical to SEQ ID NO: 1225
  Description of Artificial Sequence: Synthetic whey; 5' sequence and inner sequence

SEQ ID NO: 45151 - DNA, 53 bp, Artificial Sequence
  Description of Artificial Sequence: Synthetic whey; 5' sequence and inner sequence
tagggaagagaaggacatatgatgtacgcatcgtcccttcatgtggttccgta

SEQ ID NO: 45152 - DNA, 53 bp, Artificial Sequence; identical to SEQ ID NO: 17859
  Description of Artificial Sequence: Synthetic whey; 5' sequence and inner sequence

SEQ ID NO: 45153 - DNA, 52 bp, Artificial Sequence; identical to SEQ ID NO: 1251
  Description of Artificial Sequence: Synthetic whey; 5' sequence and inner sequence

SEQ ID NO: 45154 - DNA, 54 bp, Artificial Sequence; identical to SEQ ID NO: 1221
  Description of Artificial Sequence: Synthetic whey; 5' sequence and inner sequence

SEQ ID NO: 45155 - DNA, 53 bp, Artificial Sequence; identical to SEQ ID NO: 29147
  Description of Artificial Sequence: Synthetic whey; 5' sequence and inner sequence

SEQ ID NO: 45156 - DNA, 53 bp, Artificial Sequence; identical to SEQ ID NO: 17978
  Description of Artificial Sequence: Synthetic whey; 5' sequence and inner sequence

SEQ ID NO: 45157 - DNA, 53 bp, Artificial Sequence; identical to SEQ ID NO: 9876
  Description of Artificial Sequence: Synthetic whey; 5' sequence and inner sequence

SEQ ID NO: 45158 - DNA, 53 bp, Artificial Sequence; identical to SEQ ID NO: 21617
  Description of Artificial Sequence: Synthetic whey; 5' sequence and inner sequence

SEQ ID NO: 45159 - DNA, 53 bp, Artificial Sequence
  Description of Artificial Sequence: Synthetic whey; 5' sequence and inner sequence
tagggaagagaaggacatatgatcgtgcacacgacgacatgcactacgttgcc

SEQ ID NO: 45160 - DNA, 53 bp, Artificial Sequence; identical to SEQ ID NO: 1038
  Description of Artificial Sequence: Synthetic whey; 5' sequence and inner sequence

SEQ ID NO: 45161 - DNA, 53 bp, Artificial Sequence; identical to SEQ ID NO: 1622
  Description of Artificial Sequence: Synthetic whey; 5' sequence and inner sequence

SEQ ID NO: 45162 - DNA, 53 bp, Artificial Sequence; identical to SEQ ID NO: 1144
  Description of Artificial Sequence: Synthetic whey; 5' sequence and inner sequence

SEQ ID NO: 45163 - DNA, 53 bp, Artificial Sequence; identical to SEQ ID NO: 1231
  Description of Artificial Sequence: Synthetic whey; 5' sequence and inner sequence

SEQ ID NO: 45164 - DNA, 52 bp, Artificial Sequence
  Description of Artificial Sequence: Synthetic whey; 5' sequence and inner sequence
tagggaagagaaggacatatgatcgtgtgtgacgtacatgacgtgcttcgtg

SEQ ID NO: 45165 - DNA, 53 bp, Artificial Sequence; identical to SEQ ID NO: 21151
  Description of Artificial Sequence: Synthetic whey; 5' sequence and inner sequence

SEQ ID NO: 45166 - DNA, 53 bp, Artificial Sequence
  Description of Artificial Sequence: Synthetic whey; 5' sequence and inner sequence
tagggaagagaaggacatatgatgtcactgtgcctgaccgtcaagttgtggca

SEQ ID NO: 45167 - DNA, 53 bp, Artificial Sequence; identical to SEQ ID NO: 1151
  Description of Artificial Sequence: Synthetic whey; 5' sequence and inner sequence

SEQ ID NO: 45168 - DNA, 53 bp, Artificial Sequence; identical to SEQ ID NO: 29497
  Description of Artificial Sequence: Synthetic whey; 5' sequence and inner sequence

SEQ ID NO: 45169 - DNA, 53 bp, Artificial Sequence; identical to SEQ ID NO: 1303
  Description of Artificial Sequence: Synthetic whey; 5' sequence and inner sequence

SEQ ID NO: 45170 - DNA, 53 bp, Artificial Sequence; identical to SEQ ID NO: 1098
  Description of Artificial Sequence: Synthetic whey; 5' sequence and inner sequence

SEQ ID NO: 45171 - DNA, 53 bp, Artificial Sequence; identical to SEQ ID NO: 1352
  Description of Artificial Sequence: Synthetic whey; 5' sequence and inner sequence

SEQ ID NO: 45172 - DNA, 53 bp, Artificial Sequence; identical to SEQ ID NO: 1050
  Description of Artificial Sequence: Synthetic whey; 5' sequence and inner sequence

SEQ ID NO: 45173 - DNA, 53 bp, Artificial Sequence; identical to SEQ ID NO: 21551
  Description of Artificial Sequence: Synthetic whey; 5' sequence and inner sequence

SEQ ID NO: 45174 - DNA, 53 bp, Artificial Sequence; identical to SEQ ID NO: 1026
  Description of Artificial Sequence: Synthetic whey; 5' sequence and inner sequence

SEQ ID NO: 45175 - DNA, 53 bp, Artificial Sequence; identical to SEQ ID NO: 29526
  Description of Artificial Sequence: Synthetic whey; 5' sequence and inner sequence

SEQ ID NO: 45176 - DNA, 53 bp, Artificial Sequence; identical to SEQ ID NO: 1353
  Description of Artificial Sequence: Synthetic whey; 5' sequence and inner sequence

SEQ ID NO: 45177 - DNA, 53 bp, Artificial Sequence; identical to SEQ ID NO: 21560
  Description of Artificial Sequence: Synthetic whey; 5' sequence and inner sequence

SEQ ID NO: 45178 - DNA, 53 bp, Artificial Sequence; identical to SEQ ID NO: 1181
  Description of Artificial Sequence: Synthetic whey; 5' sequence and inner sequence

SEQ ID NO: 45179 - DNA, 53 bp, Artificial Sequence; identical to SEQ ID NO: 1728
  Description of Artificial Sequence: Synthetic whey; 5' sequence and inner sequence

SEQ ID NO: 45180 - DNA, 53 bp, Artificial Sequence; identical to SEQ ID NO: 1024
  Description of Artificial Sequence: Synthetic whey; 5' sequence and inner sequence

SEQ ID NO: 45181 - DNA, 53 bp, Artificial Sequence; identical to SEQ ID NO: 1884
  Description of Artificial Sequence: Synthetic whey; 5' sequence and inner sequence

SEQ ID NO: 45182 - DNA, 53 bp, Artificial Sequence
  Description of Artificial Sequence: Synthetic whey; 5' sequence and inner sequence
tagggaagagaaggacatatgatacgtcacggcatgcgtcacactgatgcatg

SEQ ID NO: 45183 - DNA, 53 bp, Artificial Sequence; identical to SEQ ID NO: 1617
  Description of Artificial Sequence: Synthetic whey; 5' sequence and inner sequence

SEQ ID NO: 45184 - DNA, 53 bp, Artificial Sequence; identical to SEQ ID NO: 33743
  Description of Artificial Sequence: Synthetic whey; 5' sequence and inner sequence

SEQ ID NO: 45185 - DNA, 53 bp, Artificial Sequence; identical to SEQ ID NO: 1419
  Description of Artificial Sequence: Synthetic whey; 5' sequence and inner sequence

SEQ ID NO: 45186 - DNA, 53 bp, Artificial Sequence; identical to SEQ ID NO: 1891
  Description of Artificial Sequence: Synthetic whey; 5' sequence and inner sequence

SEQ ID NO: 45187 - DNA, 53 bp, Artificial Sequence; identical to SEQ ID NO: 1365
  Description of Artificial Sequence: Synthetic whey; 5' sequence and inner sequence

SEQ ID NO: 45188 - DNA, 53 bp, Artificial Sequence; identical to SEQ ID NO: 1615
  Description of Artificial Sequence: Synthetic whey; 5' sequence and inner sequence

SEQ ID NO: 45189 - DNA, 53 bp, Artificial Sequence
  Description of Artificial Sequence: Synthetic whey; 5' sequence and inner sequence
tagggaagagaaggacatatgatgtacgactcgcaccctatcatgtaggcatg

SEQ ID NO: 45190 - DNA, 53 bp, Artificial Sequence; identical to SEQ ID NO: 29541
  Description of Artificial Sequence: Synthetic whey; 5' sequence and inner sequence

SEQ ID NO: 45191 - DNA, 53 bp, Artificial Sequence
  Description of Artificial Sequence: Synthetic whey; 5' sequence and inner sequence
tagggaagagaaggacatatgatgtcactgcgcctgaccgtcaagttgcggca

SEQ ID NO: 45192 - DNA, 53 bp, Artificial Sequence; identical to SEQ ID NO: 1414
  Description of Artificial Sequence: Synthetic whey; 5' sequence and inner sequence

SEQ ID NO: 45193 - DNA, 53 bp, Artificial Sequence; identical to SEQ ID NO: 29400
  Description of Artificial Sequence: Synthetic whey; 5' sequence and inner sequence

SEQ ID NO: 45194 - DNA, 53 bp, Artificial Sequence; identical to SEQ ID NO: 29793
  Description of Artificial Sequence: Synthetic whey; 5' sequence and inner sequence

SEQ ID NO: 45195 - DNA, 53 bp, Artificial Sequence; identical to SEQ ID NO: 1129
  Description of Artificial Sequence: Synthetic whey; 5' sequence and inner sequence

SEQ ID NO: 45196 - DNA, 53 bp, Artificial Sequence; identical to SEQ ID NO: 17861
  Description of Artificial Sequence: Synthetic whey; 5' sequence and inner sequence

SEQ ID NO: 45197 - DNA, 53 bp, Artificial Sequence; identical to SEQ ID NO: 1320
  Description of Artificial Sequence: Synthetic whey; 5' sequence and inner sequence

SEQ ID NO: 45198 - DNA, 53 bp, Artificial Sequence; identical to SEQ ID NO: 1560
  Description of Artificial Sequence: Synthetic whey; 5' sequence and inner sequence

SEQ ID NO: 45199 - DNA, 53 bp, Artificial Sequence; identical to SEQ ID NO: 29939
  Description of Artificial Sequence: Synthetic whey; 5' sequence and inner sequence

SEQ ID NO: 45200 - DNA, 53 bp, Artificial Sequence; identical to SEQ ID NO: 17513
  Description of Artificial Sequence: Synthetic whey; 5' sequence and inner sequence

SEQ ID NO: 45201 - DNA, 53 bp, Artificial Sequence; identical to SEQ ID NO: 1202
  Description of Artificial Sequence: Synthetic whey; 5' sequence and inner sequence

SEQ ID NO: 45202 - DNA, 53 bp, Artificial Sequence; identical to SEQ ID NO: 1060
  Description of Artificial Sequence: Synthetic whey; 5' sequence and inner sequence

SEQ ID NO: 45203 - DNA, 53 bp, Artificial Sequence; identical to SEQ ID NO: 21302
  Description of Artificial Sequence: Synthetic whey; 5' sequence and inner sequence

SEQ ID NO: 45204 - DNA, 53 bp, Artificial Sequence; identical to SEQ ID NO: 1517
  Description of Artificial Sequence: Synthetic whey; 5' sequence and inner sequence

SEQ ID NO: 45205 - DNA, 53 bp, Artificial Sequence; identical to SEQ ID NO: 21889
  Description of Artificial Sequence: Synthetic whey; 5' sequence and inner sequence

SEQ ID NO: 45206 - DNA, 53 bp, Artificial Sequence; identical to SEQ ID NO: 1065
  Description of Artificial Sequence: Synthetic whey; 5' sequence and inner sequence

SEQ ID NO: 45207 - DNA, 53 bp, Artificial Sequence; identical to SEQ ID NO: 21984
  Description of Artificial Sequence: Synthetic whey; 5' sequence and inner sequence

SEQ ID NO: 45208 - DNA, 53 bp, Artificial Sequence; identical to SEQ ID NO: 17399
  Description of Artificial Sequence: Synthetic whey; 5' sequence and inner sequence

SEQ ID NO: 45209 - DNA, 53 bp, Artificial Sequence; identical to SEQ ID NO: 1823
  Description of Artificial Sequence: Synthetic whey; 5' sequence and inner sequence

SEQ ID NO: 45210 - DNA, 53 bp, Artificial Sequence; identical to SEQ ID NO: 1877
  Description of Artificial Sequence: Synthetic whey; 5' sequence and inner sequence

SEQ ID NO: 45211 - DNA, 53 bp, Artificial Sequence; identical to SEQ ID NO: 21917
  Description of Artificial Sequence: Synthetic whey; 5' sequence and inner sequence

SEQ ID NO: 45212 - DNA, 53 bp, Artificial Sequence
  Description of Artificial Sequence: Synthetic whey; 5' sequence and inner sequence
tagggaagagaaggacatatgataacgtgacgcgatcggtacgtgacgttgcg

SEQ ID NO: 45213 - DNA, 53 bp, Artificial Sequence; identical to SEQ ID NO: 1192
  Description of Artificial Sequence: Synthetic whey; 5' sequence and inner sequence

SEQ ID NO: 45214 - DNA, 53 bp, Artificial Sequence
  Description of Artificial Sequence: Synthetic whey; 5' sequence and inner sequence
tagggaagagaaggacatatgatcgacacagtgcgtatcgtacgtcgtgccgc

SEQ ID NO: 45215 - DNA, 53 bp, Artificial Sequence; identical to SEQ ID NO: 29233
  Description of Artificial Sequence: Synthetic whey; 5' sequence and inner sequence

SEQ ID NO: 45216 - DNA, 53 bp, Artificial Sequence
  Description of Artificial Sequence: Synthetic whey; 5' sequence and inner sequence
tagggaagagaaggacatatgatgtcactgtgcctgcccgtcaagttgcggca

SEQ ID NO: 45217 - DNA, 53 bp, Artificial Sequence; identical to SEQ ID NO: 1780
  Description of Artificial Sequence: Synthetic whey; 5' sequence and inner sequence

SEQ ID NO: 45218 - DNA, 53 bp, Artificial Sequence; identical to SEQ ID NO: 1204
  Description of Artificial Sequence: Synthetic whey; 5' sequence and inner sequence

SEQ ID NO: 45219 - DNA, 53 bp, Artificial Sequence
  Description of Artificial Sequence: Synthetic whey; 5' sequence and inner sequence
tagggaagagaaggacatatgatcatgcgtcatgtccgtacgttcccgtcatg

SEQ ID NO: 45220 - DNA, 53 bp, Artificial Sequence; identical to SEQ ID NO: 5356
  Description of Artificial Sequence: Synthetic whey; 5' sequence and inner sequence

SEQ ID NO: 45221 - DNA, 53 bp, Artificial Sequence; identical to SEQ ID NO: 29381
  Description of Artificial Sequence: Synthetic whey; 5' sequence and inner sequence

SEQ ID NO: 45222 - DNA, 53 bp, Artificial Sequence; identical to SEQ ID NO: 5960
  Description of Artificial Sequence: Synthetic whey; 5' sequence and inner sequence

SEQ ID NO: 45223 - DNA, 53 bp, Artificial Sequence; identical to SEQ ID NO: 1090
  Description of Artificial Sequence: Synthetic whey; 5' sequence and inner sequence

SEQ ID NO: 45224 - DNA, 53 bp, Artificial Sequence; identical to SEQ ID NO: 1446
  Description of Artificial Sequence: Synthetic whey; 5' sequence and inner sequence

SEQ ID NO: 45225 - DNA, 53 bp, Artificial Sequence
  Description of Artificial Sequence: Synthetic whey; 5' sequence and inner sequence
tagggaagagaaggacatatgatacgatgcgtgacaccgtgctgcgtgtgacc

SEQ ID NO: 45226 - DNA, 53 bp, Artificial Sequence; identical to SEQ ID NO: 1437
  Description of Artificial Sequence: Synthetic whey; 5' sequence and inner sequence

SEQ ID NO: 45227 - DNA, 53 bp, Artificial Sequence
  Description of Artificial Sequence: Synthetic whey; 5' sequence and inner sequence
tagggaagagaaggacatatgatgtacgcaacgtaccgtatcgtggccatgtg

SEQ ID NO: 45228 - DNA, 53 bp, Artificial Sequence; identical to SEQ ID NO: 29701
  Description of Artificial Sequence: Synthetic whey; 5' sequence and inner sequence

SEQ ID NO: 45229 - DNA, 53 bp, Artificial Sequence; identical to SEQ ID NO: 29934
  Description of Artificial Sequence: Synthetic whey; 5' sequence and inner sequence

SEQ ID NO: 45230 - DNA, 53 bp, Artificial Sequence; identical to SEQ ID NO: 21789
  Description of Artificial Sequence: Synthetic whey; 5' sequence and inner sequence

SEQ ID NO: 45231 - DNA, 53 bp, Artificial Sequence; identical to SEQ ID NO: 1285
  Description of Artificial Sequence: Synthetic whey; 5' sequence and inner sequence

SEQ ID NO: 45232 - DNA, 53 bp, Artificial Sequence; identical to SEQ ID NO: 29699
  Description of Artificial Sequence: Synthetic whey; 5' sequence and inner sequence

SEQ ID NO: 45233 - DNA, 53 bp, Artificial Sequence; identical to SEQ ID NO: 29995
  Description of Artificial Sequence: Synthetic whey; 5' sequence and inner sequence

SEQ ID NO: 45234 - DNA, 52 bp, Artificial Sequence; identical to SEQ ID NO: 1193
  Description of Artificial Sequence: Synthetic whey; 5' sequence and inner sequence

SEQ ID NO: 45235 - DNA, 53 bp, Artificial Sequence; identical to SEQ ID NO: 21994
  Description of Artificial Sequence: Synthetic whey; 5' sequence and inner sequence

SEQ ID NO: 45236 - DNA, 53 bp, Artificial Sequence; identical to SEQ ID NO: 21426
  Description of Artificial Sequence: Synthetic whey; 5' sequence and inner sequence

SEQ ID NO: 45237 - DNA, 53 bp, Artificial Sequence
  Description of Artificial Sequence: Synthetic whey; 5' sequence and inner sequence
tagggaagagaaggacatatgatgtcactgtgcctgaccgtcaagttgcggta

SEQ ID NO: 45238 - DNA, 53 bp, Artificial Sequence
  Description of Artificial Sequence: Synthetic whey; 5' sequence and inner sequence
tagggaagagaaggacatatgatgtcatgccatcccctcgagtgtgacaggta

SEQ ID NO: 45239 - DNA, 53 bp, Artificial Sequence; identical to SEQ ID NO: 1358
  Description of Artificial Sequence: Synthetic whey; 5' sequence and inner sequence

SEQ ID NO: 45240 - DNA, 53 bp, Artificial Sequence; identical to SEQ ID NO: 29278
  Description of Artificial Sequence: Synthetic whey; 5' sequence and inner sequence

SEQ ID NO: 45241 - DNA, 53 bp, Artificial Sequence; identical to SEQ ID NO: 29924
  Description of Artificial Sequence: Synthetic whey; 5' sequence and inner sequence

SEQ ID NO: 45242 - DNA, 53 bp, Artificial Sequence; identical to SEQ ID NO: 1161
  Description of Artificial Sequence: Synthetic whey; 5' sequence and inner sequence

SEQ ID NO: 45243 - DNA, 53 bp, Artificial Sequence; identical to SEQ ID NO: 1727
  Description of Artificial Sequence: Synthetic whey; 5' sequence and inner sequence

SEQ ID NO: 45244 - DNA, 53 bp, Artificial Sequence; identical to SEQ ID NO: 9868
  Description of Artificial Sequence: Synthetic whey; 5' sequence and inner sequence

SEQ ID NO: 45245 - DNA, 53 bp, Artificial Sequence
  Description of Artificial Sequence: Synthetic whey; 5' sequence and inner sequence
tagggaagagaaggacatatgatgtcatgcacgaacactatcatgtaggcatg

SEQ ID NO: 45246 - DNA, 53 bp, Artificial Sequence; identical to SEQ ID NO: 1429
  Description of Artificial Sequence: Synthetic whey; 5' sequence and inner sequence

SEQ ID NO: 45247 - DNA, 53 bp, Artificial Sequence; identical to SEQ ID NO: 1227
  Description of Artificial Sequence: Synthetic whey; 5' sequence and inner sequence

SEQ ID NO: 45248 - DNA, 53 bp, Artificial Sequence; identical to SEQ ID NO: 29782
  Description of Artificial Sequence: Synthetic whey; 5' sequence and inner sequence

SEQ ID NO: 45249 - DNA, 53 bp, Artificial Sequence
  Description of Artificial Sequence: Synthetic whey; 5' sequence and inner sequence
tagggaagagaaggacatatgatacgtcacgcaaggaacgttacgcatgcgcg

SEQ ID NO: 45250 - DNA, 53 bp, Artificial Sequence; identical to SEQ ID NO: 1486
  Description of Artificial Sequence: Synthetic whey; 5' sequence and inner sequence

SEQ ID NO: 45251 - DNA, 53 bp, Artificial Sequence
  Description of Artificial Sequence: Synthetic whey; 5' sequence and inner sequence
tagggaagagaaggacatatgatgtccctgtgcctgaccgtcaagttgcggca

SEQ ID NO: 45252 - DNA, 53 bp, Artificial Sequence; identical to SEQ ID NO: 9627
  Description of Artificial Sequence: Synthetic whey; 5' sequence and inner sequence

SEQ ID NO: 45253 - DNA, 53 bp, Artificial Sequence; identical to SEQ ID NO: 9810
  Description of Artificial Sequence: Synthetic whey; 5' sequence and inner sequence

SEQ ID NO: 45254 - DNA, 53 bp, Artificial Sequence; identical to SEQ ID NO: 29221
  Description of Artificial Sequence: Synthetic whey; 5' sequence and inner sequence

SEQ ID NO: 45255 - DNA, 53 bp, Artificial Sequence; identical to SEQ ID NO: 1244
  Description of Artificial Sequence: Synthetic whey; 5' sequence and inner sequence

SEQ ID NO: 45256 - DNA, 53 bp, Artificial Sequence
  Description of Artificial Sequence: Synthetic whey; 5' sequence and inner sequence
tagggaagagaaggacatatgatgtaactgtgcctgaccgtcaagttgcggca

SEQ ID NO: 45257 - DNA, 53 bp, Artificial Sequence; identical to SEQ ID NO: 1219
  Description of Artificial Sequence: Synthetic whey; 5' sequence and inner sequence

SEQ ID NO: 45258 - DNA, 53 bp, Artificial Sequence; identical to SEQ ID NO: 21478
  Description of Artificial Sequence: Synthetic whey; 5' sequence and inner sequence

SEQ ID NO: 45259 - DNA, 53 bp, Artificial Sequence
  Description of Artificial Sequence: Synthetic whey; 5' sequence and inner sequence
tagggaagagaaggacatatgatcgtccgaatcgtaccgtgcatgtgcgttgt

SEQ ID NO: 45260 - DNA, 53 bp, Artificial Sequence; identical to SEQ ID NO: 13853
  Description of Artificial Sequence: Synthetic whey; 5' sequence and inner sequence

SEQ ID NO: 45261 - DNA, 53 bp, Artificial Sequence; identical to SEQ ID NO: 21944
  Description of Artificial Sequence: Synthetic whey; 5' sequence and inner sequence

SEQ ID NO: 45262 - DNA, 53 bp, Artificial Sequence; identical to SEQ ID NO: 1383
  Description of Artificial Sequence: Synthetic whey; 5' sequence and inner sequence

SEQ ID NO: 45263 - DNA, 53 bp, Artificial Sequence; identical to SEQ ID NO: 1685
  Description of Artificial Sequence: Synthetic whey; 5' sequence and inner sequence

SEQ ID NO: 45264 - DNA, 53 bp, Artificial Sequence; identical to SEQ ID NO: 1632
  Description of Artificial Sequence: Synthetic whey; 5' sequence and inner sequence

SEQ ID NO: 45265 - DNA, 53 bp, Artificial Sequence; identical to SEQ ID NO: 9910
  Description of Artificial Sequence: Synthetic whey; 5' sequence and inner sequence

SEQ ID NO: 45266 - DNA, 53 bp, Artificial Sequence; identical to SEQ ID NO: 1059
  Description of Artificial Sequence: Synthetic whey; 5' sequence and inner sequence

SEQ ID NO: 45267 - DNA, 53 bp, Artificial Sequence; identical to SEQ ID NO: 29971
  Description of Artificial Sequence: Synthetic whey; 5' sequence and inner sequence

SEQ ID NO: 45268 - DNA, 53 bp, Artificial Sequence; identical to SEQ ID NO: 1492
  Description of Artificial Sequence: Synthetic whey; 5' sequence and inner sequence

SEQ ID NO: 45269 - DNA, 53 bp, Artificial Sequence; identical to SEQ ID NO: 17585
  Description of Artificial Sequence: Synthetic whey; 5' sequence and inner sequence

SEQ ID NO: 45270 - DNA, 53 bp, Artificial Sequence; identical to SEQ ID NO: 1195
  Description of Artificial Sequence: Synthetic whey; 5' sequence and inner sequence

SEQ ID NO: 45271 - DNA, 48 bp, Artificial Sequence; identical to SEQ ID NO: 17927
  Description of Artificial Sequence: Synthetic whey; 5' sequence and inner sequence

SEQ ID NO: 45272 - DNA, 53 bp, Artificial Sequence; identical to SEQ ID NO: 1190
  Description of Artificial Sequence: Synthetic whey; 5' sequence and inner sequence

SEQ ID NO: 45273 - DNA, 53 bp, Artificial Sequence; identical to SEQ ID NO: 1069
  Description of Artificial Sequence: Synthetic whey; 5' sequence and inner sequence

SEQ ID NO: 45274 - DNA, 53 bp, Artificial Sequence; identical to SEQ ID NO: 1141
  Description of Artificial Sequence: Synthetic whey; 5' sequence and inner sequence

SEQ ID NO: 45275 - DNA, 53 bp, Artificial Sequence; identical to SEQ ID NO: 1169
  Description of Artificial Sequence: Synthetic whey; 5' sequence and inner sequence

SEQ ID NO: 45276 - DNA, 53 bp, Artificial Sequence; identical to SEQ ID NO: 1177
  Description of Artificial Sequence: Synthetic whey; 5' sequence and inner sequence

SEQ ID NO: 45277 - DNA, 53 bp, Artificial Sequence; identical to SEQ ID NO: 1082
  Description of Artificial Sequence: Synthetic whey; 5' sequence and inner sequence

SEQ ID NO: 45278 - DNA, 53 bp, Artificial Sequence
  Description of Artificial Sequence: Synthetic whey; 5' sequence and inner sequence
tagggaagagaaggacatatgatgtcattccatcccttcgagtgtgacaggta

SEQ ID NO: 45279 - DNA, 53 bp, Artificial Sequence; identical to SEQ ID NO: 9928
  Description of Artificial Sequence: Synthetic whey; 5' sequence and inner sequence

SEQ ID NO: 45280 - DNA, 52 bp, Artificial Sequence; identical to SEQ ID NO: 1873
  Description of Artificial Sequence: Synthetic whey; 5' sequence and inner sequence

SEQ ID NO: 45281 - DNA, 53 bp, Artificial Sequence; identical to SEQ ID NO: 17769
  Description of Artificial Sequence: Synthetic whey; 5' sequence and inner sequence

SEQ ID NO: 45282 - DNA, 53 bp, Artificial Sequence; identical to SEQ ID NO: 1149
  Description of Artificial Sequence: Synthetic whey; 5' sequence and inner sequence

SEQ ID NO: 45283 - DNA, 53 bp, Artificial Sequence
  Description of Artificial Sequence: Synthetic whey; 5' sequence and inner sequence
tagggaagagaaggacatatgatgtacgcctcgtcccgtcatgtggttccgta

SEQ ID NO: 45284 - DNA, 53 bp, Artificial Sequence; identical to SEQ ID NO: 1205
  Description of Artificial Sequence: Synthetic whey; 5' sequence and inner sequence

SEQ ID NO: 45285 - DNA, 53 bp, Artificial Sequence; identical to SEQ ID NO: 1955
  Description of Artificial Sequence: Synthetic whey; 5' sequence and inner sequence

SEQ ID NO: 45286 - DNA, 53 bp, Artificial Sequence; identical to SEQ ID NO: 1644
  Description of Artificial Sequence: Synthetic whey; 5' sequence and inner sequence

SEQ ID NO: 45287 - DNA, 53 bp, Artificial Sequence
  Description of Artificial Sequence: Synthetic whey; 5' sequence and inner sequence
tagggaagagaaggacatatgatggacgcaacgcaccgtatcgtggccatgta

SEQ ID NO: 45288 - DNA, 53 bp, Artificial Sequence; identical to SEQ ID NO: 1096
  Description of Artificial Sequence: Synthetic whey; 5' sequence and inner sequence

SEQ ID NO: 45289 - DNA, 53 bp, Artificial Sequence; identical to SEQ ID NO: 21473
  Description of Artificial Sequence: Synthetic whey; 5' sequence and inner sequence

SEQ ID NO: 45290 - DNA, 53 bp, Artificial Sequence; identical to SEQ ID NO: 1821
  Description of Artificial Sequence: Synthetic whey; 5' sequence and inner sequence

SEQ ID NO: 45291 - DNA, 53 bp, Artificial Sequence; identical to SEQ ID NO: 29839
  Description of Artificial Sequence: Synthetic whey; 5' sequence and inner sequence

SEQ ID NO: 45292 - DNA, 53 bp, Artificial Sequence; identical to SEQ ID NO: 1397
  Description of Artificial Sequence: Synthetic whey; 5' sequence and inner sequence

SEQ ID NO: 45293 - DNA, 53 bp, Artificial Sequence
  Description of Artificial Sequence: Synthetic whey; 5' sequence and inner sequence
tagggaagagaaggacatatgattgacgcaacgtaccgtatcgtggccatgtg

SEQ ID NO: 45294 - DNA, 52 bp, Artificial Sequence; identical to SEQ ID NO: 1975
  Description of Artificial Sequence: Synthetic whey; 5' sequence and inner sequence

SEQ ID NO: 45295 - DNA, 53 bp, Artificial Sequence; identical to SEQ ID NO: 1048
  Description of Artificial Sequence: Synthetic whey; 5' sequence and inner sequence

SEQ ID NO: 45296 - DNA, 53 bp, Artificial Sequence; identical to SEQ ID NO: 1470
  Description of Artificial Sequence: Synthetic whey; 5' sequence and inner sequence

SEQ ID NO: 45297 - DNA, 53 bp, Artificial Sequence
  Description of Artificial Sequence: Synthetic whey; 5' sequence and inner sequence
tagggaagagaaggacatatgatgtcactgtgcctcaccgtcaagttgcggca

SEQ ID NO: 45298 - DNA, 53 bp, Artificial Sequence; identical to SEQ ID NO: 1366
  Description of Artificial Sequence: Synthetic whey; 5' sequence and inner sequence

SEQ ID NO: 45299 - DNA, 53 bp, Artificial Sequence; identical to SEQ ID NO: 1901
  Description of Artificial Sequence: Synthetic whey; 5' sequence and inner sequence

SEQ ID NO: 45300 - DNA, 52 bp, Artificial Sequence; identical to SEQ ID NO: 29237
  Description of Artificial Sequence: Synthetic whey; 5' sequence and inner sequence

SEQ ID NO: 45301 - DNA, 53 bp, Artificial Sequence
  Description of Artificial Sequence: Synthetic whey; 5' sequence and inner sequence
tagggaagagaaggacatatgatagcgcaacatcgtaacgtgccatcgtcgtg

SEQ ID NO: 45302 - DNA, 53 bp, Artificial Sequence; identical to SEQ ID NO: 21879
  Description of Artificial Sequence: Synthetic whey; 5' sequence and inner sequence

SEQ ID NO: 45303 - DNA, 53 bp, Artificial Sequence; identical to SEQ ID NO: 29993
  Description of Artificial Sequence: Synthetic whey; 5' sequence and inner sequence

SEQ ID NO: 45304 - DNA, 53 bp, Artificial Sequence; identical to SEQ ID NO: 29921
  Description of Artificial Sequence: Synthetic whey; 5' sequence and inner sequence

SEQ ID NO: 45305 - DNA, 53 bp, Artificial Sequence
  Description of Artificial Sequence: Synthetic whey; 5' sequence and inner sequence
tagggaagagaaggacatatgatggacgcaacgtaccttatcgtggccatgta

SEQ ID NO: 45306 - DNA, 53 bp, Artificial Sequence; identical to SEQ ID NO: 5638
  Description of Artificial Sequence: Synthetic whey; 5' sequence and inner sequence

SEQ ID NO: 45307 - DNA, 53 bp, Artificial Sequence; identical to SEQ ID NO: 29808
  Description of Artificial Sequence: Synthetic whey; 5' sequence and inner sequence

SEQ ID NO: 45308 - DNA, 53 bp, Artificial Sequence; identical to SEQ ID NO: 41829
  Description of Artificial Sequence: Synthetic whey; 5' sequence and inner sequence

SEQ ID NO: 45309 - DNA, 53 bp, Artificial Sequence; identical to SEQ ID NO: 5938
  Description of Artificial Sequence: Synthetic whey; 5' sequence and inner sequence

SEQ ID NO: 45310 - DNA, 53 bp, Artificial Sequence; identical to SEQ ID NO: 5521
  Description of Artificial Sequence: Synthetic whey; 5' sequence and inner sequence

SEQ ID NO: 45311 - DNA, 53 bp, Artificial Sequence; identical to SEQ ID NO: 21708
  Description of Artificial Sequence: Synthetic whey; 5' sequence and inner sequence

SEQ ID NO: 45312 - DNA, 53 bp, Artificial Sequence
  Description of Artificial Sequence: Synthetic whey; 5' sequence and inner sequence
tagggaagagaaggacatatgatacgtgtcagcgtaacgtgcatgctgttgcc

SEQ ID NO: 45313 - DNA, 53 bp, Artificial Sequence; identical to SEQ ID NO: 21623
  Description of Artificial Sequence: Synthetic whey; 5' sequence and inner sequence

SEQ ID NO: 45314 - DNA, 53 bp, Artificial Sequence
  Description of Artificial Sequence: Synthetic whey; 5' sequence and inner sequence
tagggaagagaaggacatatgatgccactgtgcctgaccgtcaagttgcggca

SEQ ID NO: 45315 - DNA, 53 bp, Artificial Sequence; identical to SEQ ID NO: 1185
  Description of Artificial Sequence: Synthetic whey; 5' sequence and inner sequence

SEQ ID NO: 45316 - DNA, 51 bp, Artificial Sequence; identical to SEQ ID NO: 1148
  Description of Artificial Sequence: Synthetic whey; 5' sequence and inner sequence

SEQ ID NO: 45317 - DNA, 53 bp, Artificial Sequence; identical to SEQ ID NO: 1619
  Description of Artificial Sequence: Synthetic whey; 5' sequence and inner sequence

SEQ ID NO: 45318 - DNA, 53 bp, Artificial Sequence
  Description of Artificial Sequence: Synthetic whey; 5' sequence and inner sequence
tagggaagagaaggacatatgatcgatgcgcatcgagcacacgtccgtacgcg

SEQ ID NO: 45319 - DNA, 53 bp, Artificial Sequence; identical to SEQ ID NO: 1054
  Description of Artificial Sequence: Synthetic whey; 5' sequence and inner sequence

SEQ ID NO: 45320 - DNA, 53 bp, Artificial Sequence; identical to SEQ ID NO: 1386
  Description of Artificial Sequence: Synthetic whey; 5' sequence and inner sequence

SEQ ID NO: 45321 - DNA, 53 bp, Artificial Sequence
  Description of Artificial Sequence: Synthetic whey; 5' sequence and inner sequence
tagggaagagaaggacatatgatggacgcaacgtaacgttcgagtggtacgta

SEQ ID NO: 45322 - DNA, 53 bp, Artificial Sequence; identical to SEQ ID NO: 21983
  Description of Artificial Sequence: Synthetic whey; 5' sequence and inner sequence

SEQ ID NO: 45323 - DNA, 53 bp, Artificial Sequence; identical to SEQ ID NO: 29382
  Description of Artificial Sequence: Synthetic whey; 5' sequence and inner sequence

SEQ ID NO: 45324 - DNA, 53 bp, Artificial Sequence; identical to SEQ ID NO: 1267
  Description of Artificial Sequence: Synthetic whey; 5' sequence and inner sequence

SEQ ID NO: 45325 - DNA, 53 bp, Artificial Sequence; identical to SEQ ID NO: 17837
  Description of Artificial Sequence: Synthetic whey; 5' sequence and inner sequence

SEQ ID NO: 45326 - DNA, 53 bp, Artificial Sequence; identical to SEQ ID NO: 5289
  Description of Artificial Sequence: Synthetic whey; 5' sequence and inner sequence

SEQ ID NO: 45327 - DNA, 53 bp, Artificial Sequence; identical to SEQ ID NO: 21836
  Description of Artificial Sequence: Synthetic whey; 5' sequence and inner sequence

SEQ ID NO: 45328 - DNA, 52 bp, Artificial Sequence; identical to SEQ ID NO: 1070
  Description of Artificial Sequence: Synthetic whey; 5' sequence and inner sequence

SEQ ID NO: 45329 - DNA, 53 bp, Artificial Sequence; identical to SEQ ID NO: 5272
  Description of Artificial Sequence: Synthetic whey; 5' sequence and inner sequence

SEQ ID NO: 45330 - DNA, 53 bp, Artificial Sequence; identical to SEQ ID NO: 1860
  Description of Artificial Sequence: Synthetic whey; 5' sequence and inner sequence

SEQ ID NO: 45331 - DNA, 53 bp, Artificial Sequence; identical to SEQ ID NO: 21769
  Description of Artificial Sequence: Synthetic whey; 5' sequence and inner sequence

SEQ ID NO: 45332 - DNA, 53 bp, Artificial Sequence; identical to SEQ ID NO: 5933
  Description of Artificial Sequence: Synthetic whey; 5' sequence and inner sequence

SEQ ID NO: 45333 - DNA, 53 bp, Artificial Sequence; identical to SEQ ID NO: 1142
  Description of Artificial Sequence: Synthetic whey; 5' sequence and inner sequence

SEQ ID NO: 45334 - DNA, 53 bp, Artificial Sequence; identical to SEQ ID NO: 29591
  Description of Artificial Sequence: Synthetic whey; 5' sequence and inner sequence

SEQ ID NO: 45335 - DNA, 53 bp, Artificial Sequence; identical to SEQ ID NO: 29693
  Description of Artificial Sequence: Synthetic whey; 5' sequence and inner sequence

SEQ ID NO: 45336 - DNA, 53 bp, Artificial Sequence; identical to SEQ ID NO: 1057
  Description of Artificial Sequence: Synthetic whey; 5' sequence and inner sequence

SEQ ID NO: 45337 - DNA, 53 bp, Artificial Sequence; identical to SEQ ID NO: 1742
  Description of Artificial Sequence: Synthetic whey; 5' sequence and inner sequence

SEQ ID NO: 45338 - DNA, 53 bp, Artificial Sequence; identical to SEQ ID NO: 9579
  Description of Artificial Sequence: Synthetic whey; 5' sequence and inner sequence

SEQ ID NO: 45339 - DNA, 51 bp, Artificial Sequence; identical to SEQ ID NO: 21328
  Description of Artificial Sequence: Synthetic whey; 5' sequence and inner sequence

SEQ ID NO: 45340 - DNA, 53 bp, Artificial Sequence; identical to SEQ ID NO: 17389
  Description of Artificial Sequence: Synthetic whey; 5' sequence and inner sequence

SEQ ID NO: 45341 - DNA, 53 bp, Artificial Sequence; identical to SEQ ID NO: 1274
  Description of Artificial Sequence: Synthetic whey; 5' sequence and inner sequence

SEQ ID NO: 45342 - DNA, 53 bp, Artificial Sequence; identical to SEQ ID NO: 29674
  Description of Artificial Sequence: Synthetic whey; 5' sequence and inner sequence

SEQ ID NO: 45343 - DNA, 53 bp, Artificial Sequence; identical to SEQ ID NO: 5543
  Description of Artificial Sequence: Synthetic whey; 5' sequence and inner sequence

SEQ ID NO: 45344 - DNA, 53 bp, Artificial Sequence
  Description of Artificial Sequence: Synthetic whey; 5' sequence and inner sequence
tagggaagagaaggacatatgatcatgccacgtgatgctgtcattccgtcacg

SEQ ID NO: 45345 - DNA, 53 bp, Artificial Sequence
  Description of Artificial Sequence: Synthetic whey; 5' sequence and inner sequence
tagggaagagaaggacatatgatggacgccacgtaccgtatcgtggccatgtg

SEQ ID NO: 45346 - DNA, 53 bp, Artificial Sequence; identical to SEQ ID NO: 5419
  Description of Artificial Sequence: Synthetic whey; 5' sequence and inner sequence

SEQ ID NO: 45347 - DNA, 53 bp, Artificial Sequence; identical to SEQ ID NO: 21496
  Description of Artificial Sequence: Synthetic whey; 5' sequence and inner sequence

SEQ ID NO: 45348 - DNA, 53 bp, Artificial Sequence
  Description of Artificial Sequence: Synthetic whey; 5' sequence and inner sequence
tagggaagagaaggacatatgatacgttgcgcagtacgtgtggacgtgatgca

SEQ ID NO: 45349 - DNA, 53 bp, Artificial Sequence; identical to SEQ ID NO: 1647
  Description of Artificial Sequence: Synthetic whey; 5' sequence and inner sequence

SEQ ID NO: 45350 - DNA, 53 bp, Artificial Sequence; identical to SEQ ID NO: 1787
  Description of Artificial Sequence: Synthetic whey; 5' sequence and inner sequence

SEQ ID NO: 45351 - DNA, 53 bp, Artificial Sequence
  Description of Artificial Sequence: Synthetic whey; 5' sequence and inner sequence
tagggaagagaaggacatatgatccatctcgtcactatcatgtgtgtcacgta

SEQ ID NO: 45352 - DNA, 53 bp, Artificial Sequence; identical to SEQ ID NO: 1289
  Description of Artificial Sequence: Synthetic whey; 5' sequence and inner sequence

SEQ ID NO: 45353 - DNA, 53 bp, Artificial Sequence; identical to SEQ ID NO: 29747
  Description of Artificial Sequence: Synthetic whey; 5' sequence and inner sequence

SEQ ID NO: 45354 - DNA, 53 bp, Artificial Sequence; identical to SEQ ID NO: 22001
  Description of Artificial Sequence: Synthetic whey; 5' sequence and inner sequence

SEQ ID NO: 45355 - DNA, 53 bp, Artificial Sequence; identical to SEQ ID NO: 21458
  Description of Artificial Sequence: Synthetic whey; 5' sequence and inner sequence

SEQ ID NO: 45356 - DNA, 53 bp, Artificial Sequence; identical to SEQ ID NO: 1294
  Description of Artificial Sequence: Synthetic whey; 5' sequence and inner sequence

SEQ ID NO: 45357 - DNA, 53 bp, Artificial Sequence; identical to SEQ ID NO: 9964
  Description of Artificial Sequence: Synthetic whey; 5' sequence and inner sequence

SEQ ID NO: 45358 - DNA, 53 bp, Artificial Sequence; identical to SEQ ID NO: 21730
  Description of Artificial Sequence: Synthetic whey; 5' sequence and inner sequence

SEQ ID NO: 45359 - DNA, 53 bp, Artificial Sequence; identical to SEQ ID NO: 5603
  Description of Artificial Sequence: Synthetic whey; 5' sequence and inner sequence

SEQ ID NO: 45360 - DNA, 53 bp, Artificial Sequence; identical to SEQ ID NO: 5429
  Description of Artificial Sequence: Synthetic whey; 5' sequence and inner sequence

SEQ ID NO: 45361 - DNA, 53 bp, Artificial Sequence; identical to SEQ ID NO: 1857
  Description of Artificial Sequence: Synthetic whey; 5' sequence and inner sequence

SEQ ID NO: 45362 - DNA, 53 bp, Artificial Sequence; identical to SEQ ID NO: 13892
  Description of Artificial Sequence: Synthetic whey; 5' sequence and inner sequence

SEQ ID NO: 45363 - DNA, 53 bp, Artificial Sequence; identical to SEQ ID NO: 1789
  Description of Artificial Sequence: Synthetic whey; 5' sequence and inner sequence

SEQ ID NO: 45364 - DNA, 53 bp, Artificial Sequence; identical to SEQ ID NO: 5627
  Description of Artificial Sequence: Synthetic whey; 5' sequence and inner sequence

SEQ ID NO: 45365 - DNA, 53 bp, Artificial Sequence; identical to SEQ ID NO: 1074
  Description of Artificial Sequence: Synthetic whey; 5' sequence and inner sequence

SEQ ID NO: 45366 - DNA, 53 bp, Artificial Sequence; identical to SEQ ID NO: 1186
  Description of Artificial Sequence: Synthetic whey; 5' sequence and inner sequence

SEQ ID NO: 45367 - DNA, 53 bp, Artificial Sequence
  Description of Artificial Sequence: Synthetic whey; 5' sequence and inner sequence
tagggaagagaaggacatatgatgtcactgtgcctgaccgtcaagtttcggca

SEQ ID NO: 45368 - DNA, 53 bp, Artificial Sequence; identical to SEQ ID NO: 1183
  Description of Artificial Sequence: Synthetic whey; 5' sequence and inner sequence

SEQ ID NO: 45369 - DNA, 53 bp, Artificial Sequence; identical to SEQ ID NO: 33619
  Description of Artificial Sequence: Synthetic whey; 5' sequence and inner sequence

SEQ ID NO: 45370 - DNA, 53 bp, Artificial Sequence
  Description of Artificial Sequence: Synthetic whey; 5' sequence and inner sequence
tagggaagagaaggacatatgatgtcactgttcctgaccgtcaagttgcggca

SEQ ID NO: 45371 - DNA, 53 bp, Artificial Sequence; identical to SEQ ID NO: 29957
  Description of Artificial Sequence: Synthetic whey; 5' sequence and inner sequence

SEQ ID NO: 45372 - DNA, 53 bp, Artificial Sequence
  Description of Artificial Sequence: Synthetic whey; 5' sequence and inner sequence
tagggaagagaaggacatatgatcatggcaacgtgatgcgtgtgacctgcaca

SEQ ID NO: 45373 - DNA, 53 bp, Artificial Sequence; identical to SEQ ID NO: 29869
  Description of Artificial Sequence: Synthetic whey; 5' sequence and inner sequence

SEQ ID NO: 45374 - DNA, 53 bp, Artificial Sequence; identical to SEQ ID NO: 5890
  Description of Artificial Sequence: Synthetic whey; 5' sequence and inner sequence

SEQ ID NO: 45375 - DNA, 53 bp, Artificial Sequence; identical to SEQ ID NO: 5743
  Description of Artificial Sequence: Synthetic whey; 5' sequence and inner sequence

SEQ ID NO: 45376 - DNA, 53 bp, Artificial Sequence; identical to SEQ ID NO: 1521
  Description of Artificial Sequence: Synthetic whey; 5' sequence and inner sequence

SEQ ID NO: 45377 - DNA, 53 bp, Artificial Sequence; identical to SEQ ID NO: 29720
  Description of Artificial Sequence: Synthetic whey; 5' sequence and inner sequence

SEQ ID NO: 45378 - DNA, 53 bp, Artificial Sequence; identical to SEQ ID NO: 21811
  Description of Artificial Sequence: Synthetic whey; 5' sequence and inner sequence

SEQ ID NO: 45379 - DNA, 53 bp, Artificial Sequence
  Description of Artificial Sequence: Synthetic whey; 5' sequence and inner sequence
tagggaagagaaggacatatgatcgatgcacacgatgatgcacgtccttcggc

SEQ ID NO: 45380 - DNA, 53 bp, Artificial Sequence; identical to SEQ ID NO: 1203
  Description of Artificial Sequence: Synthetic whey; 5' sequence and inner sequence

SEQ ID NO: 45381 - DNA, 48 bp, Artificial Sequence; identical to SEQ ID NO: 21741
  Description of Artificial Sequence: Synthetic whey; 5' sequence and inner sequence

SEQ ID NO: 45382 - DNA, 53 bp, Artificial Sequence; identical to SEQ ID NO: 1805
  Description of Artificial Sequence: Synthetic whey; 5' sequence and inner sequence

SEQ ID NO: 45383 - DNA, 53 bp, Artificial Sequence; identical to SEQ ID NO: 1447
  Description of Artificial Sequence: Synthetic whey; 5' sequence and inner sequence

SEQ ID NO: 45384 - DNA, 53 bp, Artificial Sequence; identical to SEQ ID NO: 29416
  Description of Artificial Sequence: Synthetic whey; 5' sequence and inner sequence

SEQ ID NO: 45385 - DNA, 53 bp, Artificial Sequence
  Description of Artificial Sequence: Synthetic whey; 5' sequence and inner sequence
tagggaagagaaggacatatgatcacgacgtgacgtatcgctacatgcacacg

SEQ ID NO: 45386 - DNA, 53 bp, Artificial Sequence; identical to SEQ ID NO: 5787
  Description of Artificial Sequence: Synthetic whey; 5' sequence and inner sequence

SEQ ID NO: 45387 - DNA, 53 bp, Artificial Sequence; identical to SEQ ID NO: 13958
  Description of Artificial Sequence: Synthetic whey; 5' sequence and inner sequence

SEQ ID NO: 45388 - DNA, 53 bp, Artificial Sequence
  Description of Artificial Sequence: Synthetic whey; 5' sequence and inner sequence
tagggaagagaaggacatatgatcgatgcagatcgatgtcgttacgctgcacg

SEQ ID NO: 45389 - DNA, 53 bp, Artificial Sequence
  Description of Artificial Sequence: Synthetic whey; 5' sequence and inner sequence
tagggaagagaaggacatatgatgtcactgtgcctgaccgtcaagttgaggca

SEQ ID NO: 45390 - DNA, 53 bp, Artificial Sequence; identical to SEQ ID NO: 1326
  Description of Artificial Sequence: Synthetic whey; 5' sequence and inner sequence

SEQ ID NO: 45391 - DNA, 53 bp, Artificial Sequence
  Description of Artificial Sequence: Synthetic whey; 5' sequence and inner sequence
tagggaagagaaggacatatgatggccgcaacgtaccgtatcgtggccatgta

SEQ ID NO: 45392 - DNA, 53 bp, Artificial Sequence; identical to SEQ ID NO: 29316
  Description of Artificial Sequence: Synthetic whey; 5' sequence and inner sequence

SEQ ID NO: 45393 - DNA, 53 bp, Artificial Sequence; identical to SEQ ID NO: 5653
  Description of Artificial Sequence: Synthetic whey; 5' sequence and inner sequence

SEQ ID NO: 45394 - DNA, 53 bp, Artificial Sequence; identical to SEQ ID NO: 21696
  Description of Artificial Sequence: Synthetic whey; 5' sequence and inner sequence

SEQ ID NO: 45395 - DNA, 53 bp, Artificial Sequence; identical to SEQ ID NO: 1634
  Description of Artificial Sequence: Synthetic whey; 5' sequence and inner sequence

SEQ ID NO: 45396 - DNA, 53 bp, Artificial Sequence; identical to SEQ ID NO: 21722
  Description of Artificial Sequence: Synthetic whey; 5' sequence and inner sequence

SEQ ID NO: 45397 - DNA, 53 bp, Artificial Sequence; identical to SEQ ID NO: 1706
  Description of Artificial Sequence: Synthetic whey; 5' sequence and inner sequence

SEQ ID NO: 45398 - DNA, 53 bp, Artificial Sequence; identical to SEQ ID NO: 5955
  Description of Artificial Sequence: Synthetic whey; 5' sequence and inner sequence

SEQ ID NO: 45399 - DNA, 53 bp, Artificial Sequence
  Description of Artificial Sequence: Synthetic whey; 5' sequence and inner sequence
tagggaagagaaggacatatgatgtcatgccctcccttcgagtgtgacaggta

SEQ ID NO: 45400 - DNA, 53 bp, Artificial Sequence; identical to SEQ ID NO: 29329
  Description of Artificial Sequence: Synthetic whey; 5' sequence and inner sequence

SEQ ID NO: 45401 - DNA, 53 bp, Artificial Sequence; identical to SEQ ID NO: 1351
  Description of Artificial Sequence: Synthetic whey; 5' sequence and inner sequence

SEQ ID NO: 45402 - DNA, 53 bp, Artificial Sequence
  Description of Artificial Sequence: Synthetic whey; 5' sequence and inner sequence
tagggaagagaaggacatatgatgtactcatcgtcccgtcatgtggttccgta

SEQ ID NO: 45403 - DNA, 53 bp, Artificial Sequence; identical to SEQ ID NO: 9872
  Description of Artificial Sequence: Synthetic whey; 5' sequence and inner sequence

SEQ ID NO: 45404 - DNA, 53 bp, Artificial Sequence; identical to SEQ ID NO: 1132
  Description of Artificial Sequence: Synthetic whey; 5' sequence and inner sequence

SEQ ID NO: 45405 - DNA, 53 bp, Artificial Sequence; identical to SEQ ID NO: 21662
  Description of Artificial Sequence: Synthetic whey; 5' sequence and inner sequence

SEQ ID NO: 45406 - DNA, 53 bp, Artificial Sequence
  Description of Artificial Sequence: Synthetic whey; 5' sequence and inner sequence
tagggaagagaaggacatatgatgtaatgccatcccttcgagtgtgacaggta

SEQ ID NO: 45407 - DNA, 53 bp, Artificial Sequence; identical to SEQ ID NO: 29884
  Description of Artificial Sequence: Synthetic whey; 5' sequence and inner sequence

SEQ ID NO: 45408 - DNA, 53 bp, Artificial Sequence; identical to SEQ ID NO: 5621
  Description of Artificial Sequence: Synthetic whey; 5' sequence and inner sequence

SEQ ID NO: 45409 - DNA, 53 bp, Artificial Sequence; identical to SEQ ID NO: 1056
  Description of Artificial Sequence: Synthetic whey; 5' sequence and inner sequence

SEQ ID NO: 45410 - DNA, 53 bp, Artificial Sequence; identical to SEQ ID NO: 5748
  Description of Artificial Sequence: Synthetic whey; 5' sequence and inner sequence

SEQ ID NO: 45411 - DNA, 53 bp, Artificial Sequence; identical to SEQ ID NO: 17906
  Description of Artificial Sequence: Synthetic whey; 5' sequence and inner sequence

SEQ ID NO: 45412 - DNA, 53 bp, Artificial Sequence
  Description of Artificial Sequence: Synthetic whey; 5' sequence and inner sequence
tagggaagagaaggacatatgatgtacgcaacgtaccgtatcgtggccatgta

SEQ ID NO: 45413 - DNA, 53 bp, Artificial Sequence; identical to SEQ ID NO: 1256
  Description of Artificial Sequence: Synthetic whey; 5' sequence and inner sequence

SEQ ID NO: 45414 - DNA, 53 bp, Artificial Sequence; identical to SEQ ID NO: 1591
  Description of Artificial Sequence: Synthetic whey; 5' sequence and inner sequence

SEQ ID NO: 45415 - DNA, 53 bp, Artificial Sequence; identical to SEQ ID NO: 21613
  Description of Artificial Sequence: Synthetic whey; 5' sequence and inner sequence

SEQ ID NO: 45416 - DNA, 53 bp, Artificial Sequence; identical to SEQ ID NO: 21752
  Description of Artificial Sequence: Synthetic whey; 5' sequence and inner sequence

SEQ ID NO: 45417 - DNA, 53 bp, Artificial Sequence; identical to SEQ ID NO: 21530
  Description of Artificial Sequence: Synthetic whey; 5' sequence and inner sequence

SEQ ID NO: 45418 - DNA, 53 bp, Artificial Sequence; identical to SEQ ID NO: 17698
  Description of Artificial Sequence: Synthetic whey; 5' sequence and inner sequence

SEQ ID NO: 45419 - DNA, 53 bp, Artificial Sequence; identical to SEQ ID NO: 29909
  Description of Artificial Sequence: Synthetic whey; 5' sequence and inner sequence

SEQ ID NO: 45420 - DNA, 53 bp, Artificial Sequence; identical to SEQ ID NO: 5469
  Description of Artificial Sequence: Synthetic whey; 5' sequence and inner sequence

SEQ ID NO: 45421 - DNA, 53 bp, Artificial Sequence; identical to SEQ ID NO: 1114
  Description of Artificial Sequence: Synthetic whey; 5' sequence and inner sequence

SEQ ID NO: 45422 - DNA, 53 bp, Artificial Sequence
  Description of Artificial Sequence: Synthetic whey; 5' sequence and inner sequence
tagggaagagaaggacatatgatgtcactgtgcctgatcgtcaagttgcggca

SEQ ID NO: 45423 - DNA, 53 bp, Artificial Sequence; identical to SEQ ID NO: 1160
  Description of Artificial Sequence: Synthetic whey; 5' sequence and inner sequence

SEQ ID NO: 45424 - DNA, 53 bp, Artificial Sequence; identical to SEQ ID NO: 5987
  Description of Artificial Sequence: Synthetic whey; 5' sequence and inner sequence

SEQ ID NO: 45425 - DNA, 53 bp, Artificial Sequence
  Description of Artificial Sequence: Synthetic whey; 5' sequence and inner sequence
tagggaagagaaggacatatgatacgtgcaacgtcacgtgctgcgtcgtcacc

SEQ ID NO: 45426 - DNA, 53 bp, Artificial Sequence
  Description of Artificial Sequence: Synthetic whey; 5' sequence and inner sequence
tagggaagagaaggacatatgatcgtgacacgcgagccatgcgtacgtacgcg

SEQ ID NO: 45427 - DNA, 53 bp, Artificial Sequence; identical to SEQ ID NO: 1255
  Description of Artificial Sequence: Synthetic whey; 5' sequence and inner sequence

SEQ ID NO: 45428 - DNA, 53 bp, Artificial Sequence; identical to SEQ ID NO: 5620
  Description of Artificial Sequence: Synthetic whey; 5' sequence and inner sequence

SEQ ID NO: 45429 - DNA, 53 bp, Artificial Sequence; identical to SEQ ID NO: 5579
  Description of Artificial Sequence: Synthetic whey; 5' sequence and inner sequence

SEQ ID NO: 45430 - DNA, 53 bp, Artificial Sequence
  Description of Artificial Sequence: Synthetic whey; 5' sequence and inner sequence
tagggaagagaaggacatatgatgtacgcatcgccccgtcatgtggttccgta

SEQ ID NO: 45431 - DNA, 53 bp, Artificial Sequence; identical to SEQ ID NO: 33384
  Description of Artificial Sequence: Synthetic whey; 5' sequence and inner sequence

SEQ ID NO: 45432 - DNA, 53 bp, Artificial Sequence
  Description of Artificial Sequence: Synthetic whey; 5' sequence and inner sequence
tagggaagagaaggacatatgattggtcaacgcgcatacgtcacgattgcatg

SEQ ID NO: 45433 - DNA, 53 bp, Artificial Sequence; identical to SEQ ID NO: 1246
  Description of Artificial Sequence: Synthetic whey; 5' sequence and inner sequence

SEQ ID NO: 45434 - DNA, 53 bp, Artificial Sequence; identical to SEQ ID NO: 9985
  Description of Artificial Sequence: Synthetic whey; 5' sequence and inner sequence

SEQ ID NO: 45435 - DNA, 52 bp, Artificial Sequence
  Description of Artificial Sequence: Synthetic whey; 5' sequence and inner sequence
tagggaagagaaggacatatgatgtcattccgcatcctacacgtggtgcatg

SEQ ID NO: 45436 - DNA, 53 bp, Artificial Sequence; identical to SEQ ID NO: 5988
  Description of Artificial Sequence: Synthetic whey; 5' sequence and inner sequence

SEQ ID NO: 45437 - DNA, 53 bp, Artificial Sequence; identical to SEQ ID NO: 1519
  Description of Artificial Sequence: Synthetic whey; 5' sequence and inner sequence

SEQ ID NO: 45438 - DNA, 53 bp, Artificial Sequence; identical to SEQ ID NO: 5485
  Description of Artificial Sequence: Synthetic whey; 5' sequence and inner sequence

SEQ ID NO: 45439 - DNA, 53 bp, Artificial Sequence
  Description of Artificial Sequence: Synthetic whey; 5' sequence and inner sequence
tagggaagagaaggacatatgatggacgcaacgtaccgtatcgtggccctgtg

SEQ ID NO: 45440 - DNA, 53 bp, Artificial Sequence; identical to SEQ ID NO: 29978
  Description of Artificial Sequence: Synthetic whey; 5' sequence and inner sequence

SEQ ID NO: 45441 - DNA, 53 bp, Artificial Sequence; identical to SEQ ID NO: 29432
  Description of Artificial Sequence: Synthetic whey; 5' sequence and inner sequence

SEQ ID NO: 45442 - DNA, 53 bp, Artificial Sequence; identical to SEQ ID NO: 1104
  Description of Artificial Sequence: Synthetic whey; 5' sequence and inner sequence

SEQ ID NO: 45443 - DNA, 53 bp, Artificial Sequence; identical to SEQ ID NO: 17744
  Description of Artificial Sequence: Synthetic whey; 5' sequence and inner sequence

SEQ ID NO: 45444 - DNA, 53 bp, Artificial Sequence
  Description of Artificial Sequence: Synthetic whey; 5' sequence and inner sequence
tagggaagagaaggacatatgatgtcactgtgcctgaccgtcatgttgcggca

SEQ ID NO: 45445 - DNA, 53 bp, Artificial Sequence; identical to SEQ ID NO: 13743
  Description of Artificial Sequence: Synthetic whey; 5' sequence and inner sequence

SEQ ID NO: 45446 - DNA, 53 bp, Artificial Sequence
  Description of Artificial Sequence: Synthetic whey; 5' sequence and inner sequence
tagggaagagaaggacatatgatcgtaccagtacgcaacacgtcatcgtcacg

SEQ ID NO: 45447 - DNA, 53 bp, Artificial Sequence; identical to SEQ ID NO: 37514
  Description of Artificial Sequence: Synthetic whey; 5' sequence and inner sequence

SEQ ID NO: 45448 - DNA, 53 bp, Artificial Sequence; identical to SEQ ID NO: 29960
  Description of Artificial Sequence: Synthetic whey; 5' sequence and inner sequence

SEQ ID NO: 45449 - DNA, 53 bp, Artificial Sequence; identical to SEQ ID NO: 17664
  Description of Artificial Sequence: Synthetic whey; 5' sequence and inner sequence

SEQ ID NO: 45450 - DNA, 53 bp, Artificial Sequence; identical to SEQ ID NO: 29751
  Description of Artificial Sequence: Synthetic whey; 5' sequence and inner sequence

SEQ ID NO: 45451 - DNA, 53 bp, Artificial Sequence; identical to SEQ ID NO: 1367
  Description of Artificial Sequence: Synthetic whey; 5' sequence and inner sequence

SEQ ID NO: 45452 - DNA, 55 bp, Artificial Sequence
  Description of Artificial Sequence: Synthetic whey; 5' sequence and inner sequence
tagggaagagaaggacatatgatggacgcaacgtaccgtatcgtggccatgcaca

SEQ ID NO: 45453 - DNA, 53 bp, Artificial Sequence; identical to SEQ ID NO: 21324
  Description of Artificial Sequence: Synthetic whey; 5' sequence and inner sequence

SEQ ID NO: 45454 - DNA, 53 bp, Artificial Sequence
  Description of Artificial Sequence: Synthetic whey; 5' sequence and inner sequence
tagggaagagaaggacatatgatgtcactgtgcctgaccgtcaagttgctgca

SEQ ID NO: 45455 - DNA, 53 bp, Artificial Sequence; identical to SEQ ID NO: 21335
  Description of Artificial Sequence: Synthetic whey; 5' sequence and inner sequence

SEQ ID NO: 45456 - DNA, 53 bp, Artificial Sequence; identical to SEQ ID NO: 5612
  Description of Artificial Sequence: Synthetic whey; 5' sequence and inner sequence

SEQ ID NO: 45457 - DNA, 53 bp, Artificial Sequence; identical to SEQ ID NO: 1724
  Description of Artificial Sequence: Synthetic whey; 5' sequence and inner sequence

SEQ ID NO: 45458 - DNA, 53 bp, Artificial Sequence; identical to SEQ ID NO: 1920
  Description of Artificial Sequence: Synthetic whey; 5' sequence and inner sequence

SEQ ID NO: 45459 - DNA, 53 bp, Artificial Sequence; identical to SEQ ID NO: 1215
  Description of Artificial Sequence: Synthetic whey; 5' sequence and inner sequence

SEQ ID NO: 45460 - DNA, 53 bp, Artificial Sequence; identical to SEQ ID NO: 29814
  Description of Artificial Sequence: Synthetic whey; 5' sequence and inner sequence

SEQ ID NO: 45461 - DNA, 53 bp, Artificial Sequence
  Description of Artificial Sequence: Synthetic whey; 5' sequence and inner sequence
tagggaagagaaggacatatgatcgtaccacacgttacggcatgtgcttcgca

SEQ ID NO: 45462 - DNA, 53 bp, Artificial Sequence
  Description of Artificial Sequence: Synthetic whey; 5' sequence and inner sequence
tagggaagagaaggacatatgatgtcatgccataccttcgagtgtgacaggta

SEQ ID NO: 45463 - DNA, 53 bp, Artificial Sequence; identical to SEQ ID NO: 1152
  Description of Artificial Sequence: Synthetic whey; 5' sequence and inner sequence

SEQ ID NO: 45464 - DNA, 53 bp, Artificial Sequence; identical to SEQ ID NO: 17985
  Description of Artificial Sequence: Synthetic whey; 5' sequence and inner sequence

SEQ ID NO: 45465 - DNA, 53 bp, Artificial Sequence
  Description of Artificial Sequence: Synthetic whey; 5' sequence and inner sequence
tagggaagagaaggacatatgatcgtaccgcacgtgacgtgtccgtgccgtga

SEQ ID NO: 45466 - DNA, 53 bp, Artificial Sequence
  Description of Artificial Sequence: Synthetic whey; 5' sequence and inner sequence
tagggaagagaaggacatatgatttcatgccatcccttcgagtgtgacaggta

SEQ ID NO: 45467 - DNA, 53 bp, Artificial Sequence; identical to SEQ ID NO: 21683
  Description of Artificial Sequence: Synthetic whey; 5' sequence and inner sequence

SEQ ID NO: 45468 - DNA, 53 bp, Artificial Sequence; identical to SEQ ID NO: 5571
  Description of Artificial Sequence: Synthetic whey; 5' sequence and inner sequence

SEQ ID NO: 45469 - DNA, 53 bp, Artificial Sequence; identical to SEQ ID NO: 1143
  Description of Artificial Sequence: Synthetic whey; 5' sequence and inner sequence

SEQ ID NO: 45470 - DNA, 53 bp, Artificial Sequence
  Description of Artificial Sequence: Synthetic whey; 5' sequence and inner sequence
tagggaagagaaggacatatgatgcactgaacgcaccctatcatgtaggcatg

SEQ ID NO: 45471 - DNA, 53 bp, Artificial Sequence; identical to SEQ ID NO: 1034
  Description of Artificial Sequence: Synthetic whey; 5' sequence and inner sequence

SEQ ID NO: 45472 - DNA, 53 bp, Artificial Sequence
  Description of Artificial Sequence: Synthetic whey; 5' sequence and inner sequence
tagggaagagaaggacatatgatggacgcaacgtaccgtatcgtggccatgtt

SEQ ID NO: 45473 - DNA, 53 bp, Artificial Sequence
  Description of Artificial Sequence: Synthetic whey; 5' sequence and inner sequence
tagggaagagaaggacatatgatgtcatgacatcccttcgagtgtgacaggta

SEQ ID NO: 45474 - DNA, 53 bp, Artificial Sequence; identical to SEQ ID NO: 21737
  Description of Artificial Sequence: Synthetic whey; 5' sequence and inner sequence

SEQ ID NO: 45475 - DNA, 53 bp, Artificial Sequence; identical to SEQ ID NO: 25852
  Description of Artificial Sequence: Synthetic whey; 5' sequence and inner sequence

SEQ ID NO: 45476 - DNA, 53 bp, Artificial Sequence; identical to SEQ ID NO: 13985
  Description of Artificial Sequence: Synthetic whey; 5' sequence and inner sequence

SEQ ID NO: 45477 - DNA, 53 bp, Artificial Sequence; identical to SEQ ID NO: 1630
  Description of Artificial Sequence: Synthetic whey; 5' sequence and inner sequence

SEQ ID NO: 45478 - DNA, 53 bp, Artificial Sequence; identical to SEQ ID NO: 9798
  Description of Artificial Sequence: Synthetic whey; 5' sequence and inner sequence

SEQ ID NO: 45479 - DNA, 53 bp, Artificial Sequence
  Description of Artificial Sequence: Synthetic whey; 5' sequence and inner sequence
tagggaagagaaggacatatgatcgtacgacacggatacgtcctgtctgcacg

SEQ ID NO: 45480 - DNA, 53 bp, Artificial Sequence; identical to SEQ ID NO: 1321
  Description of Artificial Sequence: Synthetic whey; 5' sequence and inner sequence

SEQ ID NO: 45481 - DNA, 53 bp, Artificial Sequence; identical to SEQ ID NO: 21801
  Description of Artificial Sequence: Synthetic whey; 5' sequence and inner sequence

SEQ ID NO: 45482 - DNA, 53 bp, Artificial Sequence; identical to SEQ ID NO: 1137
  Description of Artificial Sequence: Synthetic whey; 5' sequence and inner sequence

SEQ ID NO: 45483 - DNA, 53 bp, Artificial Sequence; identical to SEQ ID NO: 1553
  Description of Artificial Sequence: Synthetic whey; 5' sequence and inner sequence

SEQ ID NO: 45484 - DNA, 53 bp, Artificial Sequence
  Description of Artificial Sequence: Synthetic whey; 5' sequence and inner sequence
tagggaagagaaggacatatgatgtacgcatcgtcccgtcatgtggatccgta

SEQ ID NO: 45485 - DNA, 53 bp, Artificial Sequence; identical to SEQ ID NO: 21776
  Description of Artificial Sequence: Synthetic whey; 5' sequence and inner sequence

SEQ ID NO: 45486 - DNA, 53 bp, Artificial Sequence; identical to SEQ ID NO: 21903
  Description of Artificial Sequence: Synthetic whey; 5' sequence and inner sequence

SEQ ID NO: 45487 - DNA, 53 bp, Artificial Sequence
  Description of Artificial Sequence: Synthetic whey; 5' sequence and inner sequence
tagggaagagaaggacatatgatttcattccgcatcctacacgtgggcacgta

SEQ ID NO: 45488 - DNA, 53 bp, Artificial Sequence; identical to SEQ ID NO: 1088
  Description of Artificial Sequence: Synthetic whey; 5' sequence and inner sequence

SEQ ID NO: 45489 - DNA, 53 bp, Artificial Sequence; identical to SEQ ID NO: 21982
  Description of Artificial Sequence: Synthetic whey; 5' sequence and inner sequence

SEQ ID NO: 45490 - DNA, 53 bp, Artificial Sequence
  Description of Artificial Sequence: Synthetic whey; 5' sequence and inner sequence
tagggaagagaaggacatatgatggactcaacgtaccgtatcgtggccatgtg

SEQ ID NO: 45491 - DNA, 53 bp, Artificial Sequence; identical to SEQ ID NO: 21746
  Description of Artificial Sequence: Synthetic whey; 5' sequence and inner sequence

SEQ ID NO: 45492 - DNA, 53 bp, Artificial Sequence; identical to SEQ ID NO: 1282
  Description of Artificial Sequence: Synthetic whey; 5' sequence and inner sequence

SEQ ID NO: 45493 - DNA, 53 bp, Artificial Sequence
  Description of Artificial Sequence: Synthetic whey; 5' sequence and inner sequence
tagggaagagaaggacatatgatcgtgcagcacgtacattgcgtcacgttggc

SEQ ID NO: 45494 - DNA, 53 bp, Artificial Sequence; identical to SEQ ID NO: 17948
  Description of Artificial Sequence: Synthetic whey; 5' sequence and inner sequence

SEQ ID NO: 45495 - DNA, 53 bp, Artificial Sequence; identical to SEQ ID NO: 21519
  Description of Artificial Sequence: Synthetic whey; 5' sequence and inner sequence

SEQ ID NO: 45496 - DNA, 53 bp, Artificial Sequence; identical to SEQ ID NO: 1493
  Description of Artificial Sequence: Synthetic whey; 5' sequence and inner sequence

SEQ ID NO: 45497 - DNA, 53 bp, Artificial Sequence
  Description of Artificial Sequence: Synthetic whey; 5' sequence and inner sequence
tagggaagagaaggacatatgatgtacgcatcgtcccgtcatgtggttcagta

SEQ ID NO: 45498 - DNA, 53 bp, Artificial Sequence; identical to SEQ ID NO: 21869
  Description of Artificial Sequence: Synthetic whey; 5' sequence and inner sequence

SEQ ID NO: 45499 - DNA, 53 bp, Artificial Sequence
  Description of Artificial Sequence: Synthetic whey; 5' sequence and inner sequence
tagggaagagaaggacatatgatacgtcaaaacgcagtgcatcacgttgcgca

SEQ ID NO: 45500 - DNA, 53 bp, Artificial Sequence
  Description of Artificial Sequence: Synthetic whey; 5' sequence and inner sequence
tagggaagagaaggacatatgatgtcatgccatcccttcgagtgtgaccggta

SEQ ID NO: 45501 - DNA, 53 bp, Artificial Sequence; identical to SEQ ID NO: 6001
  Description of Artificial Sequence: Synthetic whey; 5' sequence and inner sequence

SEQ ID NO: 45502 - DNA, 53 bp, Artificial Sequence; identical to SEQ ID NO: 1551
  Description of Artificial Sequence: Synthetic whey; 5' sequence and inner sequence

SEQ ID NO: 45503 - DNA, 53 bp, Artificial Sequence; identical to SEQ ID NO: 33190
  Description of Artificial Sequence: Synthetic whey; 5' sequence and inner sequence

SEQ ID NO: 45504 - DNA, 53 bp, Artificial Sequence; identical to SEQ ID NO: 29874
  Description of Artificial Sequence: Synthetic whey; 5' sequence and inner sequence

SEQ ID NO: 45505 - DNA, 53 bp, Artificial Sequence; identical to SEQ ID NO: 21269
  Description of Artificial Sequence: Synthetic whey; 5' sequence and inner sequence

SEQ ID NO: 45506 - DNA, 53 bp, Artificial Sequence; identical to SEQ ID NO: 29860
  Description of Artificial Sequence: Synthetic whey; 5' sequence and inner sequence

SEQ ID NO: 45507 - DNA, 53 bp, Artificial Sequence
  Description of Artificial Sequence: Synthetic whey; 5' sequence and inner sequence
tagggaagagaaggacatatgatggacgactcgcaccctatcatgtaggcatg

SEQ ID NO: 45508 - DNA, 53 bp, Artificial Sequence; identical to SEQ ID NO: 1324
  Description of Artificial Sequence: Synthetic whey; 5' sequence and inner sequence

SEQ ID NO: 45509 - DNA, 53 bp, Artificial Sequence
  Description of Artificial Sequence: Synthetic whey; 5' sequence and inner sequence
tagggaagagaaggacatatgatcgtgacgtaacggcaaggtgaccatgcaca

SEQ ID NO: 45510 - DNA, 53 bp, Artificial Sequence; identical to SEQ ID NO: 1580
  Description of Artificial Sequence: Synthetic whey; 5' sequence and inner sequence

SEQ ID NO: 45511 - DNA, 53 bp, Artificial Sequence
  Description of Artificial Sequence: Synthetic whey; 5' sequence and inner sequence
tagggaagagaaggacatatgatgtcatgccatcccttctagtgtgacaggta

SEQ ID NO: 45512 - DNA, 53 bp, Artificial Sequence; identical to SEQ ID NO: 1868
  Description of Artificial Sequence: Synthetic whey; 5' sequence and inner sequence

SEQ ID NO: 45513 - DNA, 53 bp, Artificial Sequence; identical to SEQ ID NO: 21286
  Description of Artificial Sequence: Synthetic whey; 5' sequence and inner sequence

SEQ ID NO: 45514 - DNA, 53 bp, Artificial Sequence; identical to SEQ ID NO: 29780
  Description of Artificial Sequence: Synthetic whey; 5' sequence and inner sequence

SEQ ID NO: 45515 - DNA, 53 bp, Artificial Sequence; identical to SEQ ID NO: 5918
  Description of Artificial Sequence: Synthetic whey; 5' sequence and inner sequence

SEQ ID NO: 45516 - DNA, 53 bp, Artificial Sequence; identical to SEQ ID NO: 17265
  Description of Artificial Sequence: Synthetic whey; 5' sequence and inner sequence

SEQ ID NO: 45517 - DNA, 53 bp, Artificial Sequence; identical to SEQ ID NO: 1945
  Description of Artificial Sequence: Synthetic whey; 5' sequence and inner sequence

SEQ ID NO: 45518 - DNA, 53 bp, Artificial Sequence; identical to SEQ ID NO: 9938
  Description of Artificial Sequence: Synthetic whey; 5' sequence and inner sequence

SEQ ID NO: 45519 - DNA, 53 bp, Artificial Sequence; identical to SEQ ID NO: 13659
  Description of Artificial Sequence: Synthetic whey; 5' sequence and inner sequence

SEQ ID NO: 45520 - DNA, 53 bp, Artificial Sequence; identical to SEQ ID NO: 5997
  Description of Artificial Sequence: Synthetic whey; 5' sequence and inner sequence

SEQ ID NO: 45521 - DNA, 53 bp, Artificial Sequence
  Description of Artificial Sequence: Synthetic whey; 5' sequence and inner sequence
tagggaagagaaggacatatgatgtcatgccatcccttcgagtgttacaggta

SEQ ID NO: 45522 - DNA, 53 bp, Artificial Sequence; identical to SEQ ID NO: 21229
  Description of Artificial Sequence: Synthetic whey; 5' sequence and inner sequence

SEQ ID NO: 45523 - DNA, 53 bp, Artificial Sequence; identical to SEQ ID NO: 21784
  Description of Artificial Sequence: Synthetic whey; 5' sequence and inner sequence

SEQ ID NO: 45524 - DNA, 53 bp, Artificial Sequence
  Description of Artificial Sequence: Synthetic whey; 5' sequence and inner sequence
tagggaagagaaggacatatgatacgtcaacatggcgcggttcgtaacgcaca

SEQ ID NO: 45525 - DNA, 53 bp, Artificial Sequence; identical to SEQ ID NO: 1173
  Description of Artificial Sequence: Synthetic whey; 5' sequence and inner sequence

SEQ ID NO: 45526 - DNA, 53 bp, Artificial Sequence; identical to SEQ ID NO: 1140
  Description of Artificial Sequence: Synthetic whey; 5' sequence and inner sequence

SEQ ID NO: 45527 - DNA, 53 bp, Artificial Sequence
  Description of Artificial Sequence: Synthetic whey; 5' sequence and inner sequence
tagggaagagaaggacatatgatgcacttcacgcaccctatcatgtaggcatg

SEQ ID NO: 45528 - DNA, 49 bp, Artificial Sequence; identical to SEQ ID NO: 1893
  Description of Artificial Sequence: Synthetic whey; 5' sequence and inner sequence

SEQ ID NO: 45529 - DNA, 53 bp, Artificial Sequence; identical to SEQ ID NO: 5420
  Description of Artificial Sequence: Synthetic whey; 5' sequence and inner sequence

SEQ ID NO: 45530 - DNA, 53 bp, Artificial Sequence; identical to SEQ ID NO: 6002
  Description of Artificial Sequence: Synthetic whey; 5' sequence and inner sequence

SEQ ID NO: 45531 - DNA, 53 bp, Artificial Sequence
  Description of Artificial Sequence: Synthetic whey; 5' sequence and inner sequence
tagggaagagaaggacatatgatgtacgcatcgtcccgccatgtggttccgta

SEQ ID NO: 45532 - DNA, 53 bp, Artificial Sequence; identical to SEQ ID NO: 1828
  Description of Artificial Sequence: Synthetic whey; 5' sequence and inner sequence

SEQ ID NO: 45533 - DNA, 52 bp, Artificial Sequence
  Description of Artificial Sequence: Synthetic whey; 5' sequence and inner sequence
tagggaagagaaggacatatgatcgatacggcatgatcgtacgtgctgctgc

SEQ ID NO: 45534 - DNA, 53 bp, Artificial Sequence; identical to SEQ ID NO: 21972
  Description of Artificial Sequence: Synthetic whey; 5' sequence and inner sequence

SEQ ID NO: 45535 - DNA, 53 bp, Artificial Sequence; identical to SEQ ID NO: 21988
  Description of Artificial Sequence: Synthetic whey; 5' sequence and inner sequence

SEQ ID NO: 45536 - DNA, 53 bp, Artificial Sequence; identical to SEQ ID NO: 37797
  Description of Artificial Sequence: Synthetic whey; 5' sequence and inner sequence

SEQ ID NO: 45537 - DNA, 53 bp, Artificial Sequence; identical to SEQ ID NO: 17352
  Description of Artificial Sequence: Synthetic whey; 5' sequence and inner sequence

SEQ ID NO: 45538 - DNA, 53 bp, Artificial Sequence; identical to SEQ ID NO: 1105
  Description of Artificial Sequence: Synthetic whey; 5' sequence and inner sequence

SEQ ID NO: 45539 - DNA, 53 bp, Artificial Sequence; identical to SEQ ID NO: 1270
  Description of Artificial Sequence: Synthetic whey; 5' sequence and inner sequence

SEQ ID NO: 45540 - DNA, 53 bp, Artificial Sequence; identical to SEQ ID NO: 1042
  Description of Artificial Sequence: Synthetic whey; 5' sequence and inner sequence

SEQ ID NO: 45541 - DNA, 53 bp, Artificial Sequence; identical to SEQ ID NO: 37768
  Description of Artificial Sequence: Synthetic whey; 5' sequence and inner sequence

SEQ ID NO: 45542 - DNA, 53 bp, Artificial Sequence
  Description of Artificial Sequence: Synthetic whey; 5' sequence and inner sequence
tagggaagagaaggacatatgatacgtcgcatgcgtaacgtacgtccatcgcg

SEQ ID NO: 45543 - DNA, 53 bp, Artificial Sequence; identical to SEQ ID NO: 1106
  Description of Artificial Sequence: Synthetic whey; 5' sequence and inner sequence

SEQ ID NO: 45544 - DNA, 53 bp, Artificial Sequence
  Description of Artificial Sequence: Synthetic whey; 5' sequence and inner sequence
tagggaagagaaggacatatgatacgtcacacaacggtacgtatgcactgcgt

SEQ ID NO: 45545 - DNA, 53 bp, Artificial Sequence
  Description of Artificial Sequence: Synthetic whey; 5' sequence and inner sequence
tagggaagagaaggacatatgatccatagcgtcactatcatgtgtgtcacgta

SEQ ID NO: 45546 - DNA, 53 bp, Artificial Sequence; identical to SEQ ID NO: 17726
  Description of Artificial Sequence: Synthetic whey; 5' sequence and inner sequence

SEQ ID NO: 45547 - DNA, 53 bp, Artificial Sequence
  Description of Artificial Sequence: Synthetic whey; 5' sequence and inner sequence
tagggaagagaaggacatatgatgggcacagcgtacctcaacgtggacgtgca

SEQ ID NO: 45548 - DNA, 53 bp, Artificial Sequence; identical to SEQ ID NO: 29688
  Description of Artificial Sequence: Synthetic whey; 5' sequence and inner sequence

SEQ ID NO: 45549 - DNA, 53 bp, Artificial Sequence
  Description of Artificial Sequence: Synthetic whey; 5' sequence and inner sequence
tagggaagagaaggacatatgatcgtgacgtagcgaggcgtactgcatgcgcg

SEQ ID NO: 45550 - DNA, 53 bp, Artificial Sequence; identical to SEQ ID NO: 29582
  Description of Artificial Sequence: Synthetic whey; 5' sequence and inner sequence

SEQ ID NO: 45551 - DNA, 53 bp, Artificial Sequence; identical to SEQ ID NO: 5707
  Description of Artificial Sequence: Synthetic whey; 5' sequence and inner sequence

SEQ ID NO: 45552 - DNA, 53 bp, Artificial Sequence
  Description of Artificial Sequence: Synthetic whey; 5' sequence and inner sequence
tagggaagagaaggacatatgatcgtgcacacgacaggatacgttgcgacacg

SEQ ID NO: 45553 - DNA, 53 bp, Artificial Sequence; identical to SEQ ID NO: 21817
  Description of Artificial Sequence: Synthetic whey; 5' sequence and inner sequence

SEQ ID NO: 45554 - DNA, 53 bp, Artificial Sequence; identical to SEQ ID NO: 21880
  Description of Artificial Sequence: Synthetic whey; 5' sequence and inner sequence

SEQ ID NO: 45555 - DNA, 53 bp, Artificial Sequence
  Description of Artificial Sequence: Synthetic whey; 5' sequence and inner sequence
tagggaagagaaggacatatgatcgtacacactgacgacatacgtgctgcaca

SEQ ID NO: 45556 - DNA, 53 bp, Artificial Sequence
  Description of Artificial Sequence: Synthetic whey; 5' sequence and inner sequence
tagggaagagaaggacatatgatgtcactgtgcctgaccgacaagttgcggca

SEQ ID NO: 45557 - DNA, 53 bp, Artificial Sequence; identical to SEQ ID NO: 29503
  Description of Artificial Sequence: Synthetic whey; 5' sequence and inner sequence

SEQ ID NO: 45558 - DNA, 53 bp, Artificial Sequence; identical to SEQ ID NO: 21417
  Description of Artificial Sequence: Synthetic whey; 5' sequence and inner sequence

SEQ ID NO: 45559 - DNA, 53 bp, Artificial Sequence; identical to SEQ ID NO: 21580
  Description of Artificial Sequence: Synthetic whey; 5' sequence and inner sequence

SEQ ID NO: 45560 - DNA, 53 bp, Artificial Sequence
  Description of Artificial Sequence: Synthetic whey; 5' sequence and inner sequence
tagggaagagaaggacatatgattgcgtgtcgtacgcatacgtgtgctgcgtg

SEQ ID NO: 45561 - DNA, 53 bp, Artificial Sequence
  Description of Artificial Sequence: Synthetic whey; 5' sequence and inner sequence
tagggaagagaaggacatatgatgtccgcatcgtcccgtcatgtggttccgta

SEQ ID NO: 45562 - DNA, 53 bp, Artificial Sequence; identical to SEQ ID NO: 21410
  Description of Artificial Sequence: Synthetic whey; 5' sequence and inner sequence

SEQ ID NO: 45563 - DNA, 53 bp, Artificial Sequence; identical to SEQ ID NO: 1559
  Description of Artificial Sequence: Synthetic whey; 5' sequence and inner sequence

SEQ ID NO: 45564 - DNA, 53 bp, Artificial Sequence; identical to SEQ ID NO: 1661
  Description of Artificial Sequence: Synthetic whey; 5' sequence and inner sequence

SEQ ID NO: 45565 - DNA, 53 bp, Artificial Sequence
  Description of Artificial Sequence: Synthetic whey; 5' sequence and inner sequence
tagggaagagaaggacatatgatgcacgcctcgcaccctatcatgtaggcatg

SEQ ID NO: 45566 - DNA, 53 bp, Artificial Sequence; identical to SEQ ID NO: 1247
  Description of Artificial Sequence: Synthetic whey; 5' sequence and inner sequence

SEQ ID NO: 45567 - DNA, 53 bp, Artificial Sequence; identical to SEQ ID NO: 5229
  Description of Artificial Sequence: Synthetic whey; 5' sequence and inner sequence

SEQ ID NO: 45568 - DNA, 53 bp, Artificial Sequence; identical to SEQ ID NO: 1236
  Description of Artificial Sequence: Synthetic whey; 5' sequence and inner sequence

SEQ ID NO: 45569 - DNA, 53 bp, Artificial Sequence; identical to SEQ ID NO: 1543
  Description of Artificial Sequence: Synthetic whey; 5' sequence and inner sequence

SEQ ID NO: 45570 - DNA, 54 bp, Artificial Sequence; identical to SEQ ID NO: 1250
  Description of Artificial Sequence: Synthetic whey; 5' sequence and inner sequence

SEQ ID NO: 45571 - DNA, 53 bp, Artificial Sequence; identical to SEQ ID NO: 17950
  Description of Artificial Sequence: Synthetic whey; 5' sequence and inner sequence

SEQ ID NO: 45572 - DNA, 53 bp, Artificial Sequence; identical to SEQ ID NO: 1913
  Description of Artificial Sequence: Synthetic whey; 5' sequence and inner sequence

SEQ ID NO: 45573 - DNA, 53 bp, Artificial Sequence; identical to SEQ ID NO: 5867
  Description of Artificial Sequence: Synthetic whey; 5' sequence and inner sequence

SEQ ID NO: 45574 - DNA, 53 bp, Artificial Sequence; identical to SEQ ID NO: 29739
  Description of Artificial Sequence: Synthetic whey; 5' sequence and inner sequence

SEQ ID NO: 45575 - DNA, 53 bp, Artificial Sequence; identical to SEQ ID NO: 21372
  Description of Artificial Sequence: Synthetic whey; 5' sequence and inner sequence

SEQ ID NO: 45576 - DNA, 53 bp, Artificial Sequence; identical to SEQ ID NO: 29672
  Description of Artificial Sequence: Synthetic whey; 5' sequence and inner sequence

SEQ ID NO: 45577 - DNA, 53 bp, Artificial Sequence
  Description of Artificial Sequence: Synthetic whey; 5' sequence and inner sequence
tagggaagagaaggacatatgatcgagacaacgtgacgtgccgatgcgacgcg

SEQ ID NO: 45578 - DNA, 53 bp, Artificial Sequence; identical to SEQ ID NO: 1139
  Description of Artificial Sequence: Synthetic whey; 5' sequence and inner sequence

SEQ ID NO: 45579 - DNA, 53 bp, Artificial Sequence; identical to SEQ ID NO: 29914
  Description of Artificial Sequence: Synthetic whey; 5' sequence and inner sequence

SEQ ID NO: 45580 - DNA, 53 bp, Artificial Sequence
  Description of Artificial Sequence: Synthetic whey; 5' sequence and inner sequence
tagggaagagaaggacatatgatcgtgcgcatggcagcatacgtccgtacgcg

SEQ ID NO: 45581 - DNA, 53 bp, Artificial Sequence; identical to SEQ ID NO: 21979
  Description of Artificial Sequence: Synthetic whey; 5' sequence and inner sequence

SEQ ID NO: 45582 - DNA, 53 bp, Artificial Sequence
  Description of Artificial Sequence: Synthetic whey; 5' sequence and inner sequence
tagggaagagaaggacatatgatacgatgcggcacaacgtcacgtacgtagcg

SEQ ID NO: 45583 - DNA, 53 bp, Artificial Sequence
  Description of Artificial Sequence: Synthetic whey; 5' sequence and inner sequence
tagggaagagaaggacatatgatttcatgcacgaacactatcatggcggcatg

SEQ ID NO: 45584 - DNA, 53 bp, Artificial Sequence; identical to SEQ ID NO: 1122
  Description of Artificial Sequence: Synthetic whey; 5' sequence and inner sequence

SEQ ID NO: 45585 - DNA, 53 bp, Artificial Sequence; identical to SEQ ID NO: 29805
  Description of Artificial Sequence: Synthetic whey; 5' sequence and inner sequence

SEQ ID NO: 45586 - DNA, 53 bp, Artificial Sequence; identical to SEQ ID NO: 1124
  Description of Artificial Sequence: Synthetic whey; 5' sequence and inner sequence

SEQ ID NO: 45587 - DNA, 53 bp, Artificial Sequence; identical to SEQ ID NO: 1196
  Description of Artificial Sequence: Synthetic whey; 5' sequence and inner sequence

SEQ ID NO: 45588 - DNA, 53 bp, Artificial Sequence; identical to SEQ ID NO: 1287
  Description of Artificial Sequence: Synthetic whey; 5' sequence and inner sequence

SEQ ID NO: 45589 - DNA, 53 bp, Artificial Sequence; identical to SEQ ID NO: 1064
  Description of Artificial Sequence: Synthetic whey; 5' sequence and inner sequence

SEQ ID NO: 45590 - DNA, 53 bp, Artificial Sequence; identical to SEQ ID NO: 17688
  Description of Artificial Sequence: Synthetic whey; 5' sequence and inner sequence

SEQ ID NO: 45591 - DNA, 53 bp, Artificial Sequence; identical to SEQ ID NO: 1032
  Description of Artificial Sequence: Synthetic whey; 5' sequence and inner sequence

SEQ ID NO: 45592 - DNA, 53 bp, Artificial Sequence; identical to SEQ ID NO: 1248
  Description of Artificial Sequence: Synthetic whey; 5' sequence and inner sequence

SEQ ID NO: 45593 - DNA, 53 bp, Artificial Sequence; identical to SEQ ID NO: 1154
  Description of Artificial Sequence: Synthetic whey; 5' sequence and inner sequence

SEQ ID NO: 45594 - DNA, 53 bp, Artificial Sequence; identical to SEQ ID NO: 29806
  Description of Artificial Sequence: Synthetic whey; 5' sequence and inner sequence

SEQ ID NO: 45595 - DNA, 53 bp, Artificial Sequence
  Description of Artificial Sequence: Synthetic whey; 5' sequence and inner sequence
tagggaagagaaggacatatgatgtcactgtgcctgaccgccaagttgcggca

SEQ ID NO: 45596 - DNA, 53 bp, Artificial Sequence
  Description of Artificial Sequence: Synthetic whey; 5' sequence and inner sequence
tagggaagagaaggacatatgatgtcattgtgcctgaccgtcaagttgcggca

SEQ ID NO: 45597 - DNA, 53 bp, Artificial Sequence
  Description of Artificial Sequence: Synthetic whey; 5' sequence and inner sequence
tagggaagagaaggacatatgatggacgcaacgtaccgcatcgtggccatgta

SEQ ID NO: 45598 - DNA, 53 bp, Artificial Sequence; identical to SEQ ID NO: 29959
  Description of Artificial Sequence: Synthetic whey; 5' sequence and inner sequence

SEQ ID NO: 45599 - DNA, 53 bp, Artificial Sequence
  Description of Artificial Sequence: Synthetic whey; 5' sequence and inner sequence
tagggaagagaaggacatatgatacgacggcacgacgtaagcatgacggtgtg

SEQ ID NO: 45600 - DNA, 53 bp, Artificial Sequence; identical to SEQ ID NO: 1928
  Description of Artificial Sequence: Synthetic whey; 5' sequence and inner sequence

SEQ ID NO: 45601 - DNA, 53 bp, Artificial Sequence; identical to SEQ ID NO: 1420
  Description of Artificial Sequence: Synthetic whey; 5' sequence and inner sequence

SEQ ID NO: 45602 - DNA, 53 bp, Artificial Sequence
  Description of Artificial Sequence: Synthetic whey; 5' sequence and inner sequence
tagggaagagaaggacatatgatcgtgacaacgttgcgacatcatgctgcacg

SEQ ID NO: 45603 - DNA, 53 bp, Artificial Sequence; identical to SEQ ID NO: 9953
  Description of Artificial Sequence: Synthetic whey; 5' sequence and inner sequence

SEQ ID NO: 45604 - DNA, 53 bp, Artificial Sequence; identical to SEQ ID NO: 21502
  Description of Artificial Sequence: Synthetic whey; 5' sequence and inner sequence

SEQ ID NO: 45605 - DNA, 51 bp, Artificial Sequence; identical to SEQ ID NO: 5786
  Description of Artificial Sequence: Synthetic whey; 5' sequence and inner sequence

SEQ ID NO: 45606 - DNA, 53 bp, Artificial Sequence; identical to SEQ ID NO: 1076
  Description of Artificial Sequence: Synthetic whey; 5' sequence and inner sequence

SEQ ID NO: 45607 - DNA, 53 bp, Artificial Sequence; identical to SEQ ID NO: 29907
  Description of Artificial Sequence: Synthetic whey; 5' sequence and inner sequence

SEQ ID NO: 45608 - DNA, 53 bp, Artificial Sequence; identical to SEQ ID NO: 13821
  Description of Artificial Sequence: Synthetic whey; 5' sequence and inner sequence

SEQ ID NO: 45609 - DNA, 53 bp, Artificial Sequence
  Description of Artificial Sequence: Synthetic whey; 5' sequence and inner sequence
tagggaagagaaggacatatgattgacgcaacgtaccgtatcgtggccatgta

SEQ ID NO: 45610 - DNA, 53 bp, Artificial Sequence
  Description of Artificial Sequence: Synthetic whey; 5' sequence and inner sequence
tagggaagagaaggacatatgatggacgccacgtaccgtatcgtggccatgta

SEQ ID NO: 45611 - DNA, 53 bp, Artificial Sequence
  Description of Artificial Sequence: Synthetic whey; 5' sequence and inner sequence
tagggaagagaaggacatatgatcacgtgacgtacgtagcagtgtggccgatc

SEQ ID NO: 45612 - DNA, 53 bp, Artificial Sequence; identical to SEQ ID NO: 1678
  Description of Artificial Sequence: Synthetic whey; 5' sequence and inner sequence

SEQ ID NO: 45613 - DNA, 53 bp, Artificial Sequence; identical to SEQ ID NO: 33191
  Description of Artificial Sequence: Synthetic whey; 5' sequence and inner sequence

SEQ ID NO: 45614 - DNA, 53 bp, Artificial Sequence
  Description of Artificial Sequence: Synthetic whey; 5' sequence and inner sequence
tagggaagagaaggacatatgatgacacacagtgacgtcaccatgccgtatcg

SEQ ID NO: 45615 - DNA, 53 bp, Artificial Sequence; identical to SEQ ID NO: 1099
  Description of Artificial Sequence: Synthetic whey; 5' sequence and inner sequence

SEQ ID NO: 45616 - DNA, 53 bp, Artificial Sequence; identical to SEQ ID NO: 1136
  Description of Artificial Sequence: Synthetic whey; 5' sequence and inner sequence

SEQ ID NO: 45617 - DNA, 53 bp, Artificial Sequence; identical to SEQ ID NO: 21515
  Description of Artificial Sequence: Synthetic whey; 5' sequence and inner sequence

SEQ ID NO: 45618 - DNA, 53 bp, Artificial Sequence; identical to SEQ ID NO: 5940
  Description of Artificial Sequence: Synthetic whey; 5' sequence and inner sequence

SEQ ID NO: 45619 - DNA, 53 bp, Artificial Sequence
  Description of Artificial Sequence: Synthetic whey; 5' sequence and inner sequence
tagggaagagaaggacatatgatgtacgcatcttcccgtcatgtggttccgta

SEQ ID NO: 45620 - DNA, 53 bp, Artificial Sequence
  Description of Artificial Sequence: Synthetic whey; 5' sequence and inner sequence
tagggaagagaaggacatatgatgtcactgtgcctgaccgtcaaggtgcggca

SEQ ID NO: 45621 - DNA, 53 bp, Artificial Sequence; identical to SEQ ID NO: 1291
  Description of Artificial Sequence: Synthetic whey; 5' sequence and inner sequence

SEQ ID NO: 45622 - DNA, 53 bp, Artificial Sequence; identical to SEQ ID NO: 29677
  Description of Artificial Sequence: Synthetic whey; 5' sequence and inner sequence

SEQ ID NO: 45623 - DNA, 53 bp, Artificial Sequence
  Description of Artificial Sequence: Synthetic whey; 5' sequence and inner sequence
tagggaagagaaggacatatgatgcgttacggtgcacgagtacgtccttcgcg

SEQ ID NO: 45624 - DNA, 53 bp, Artificial Sequence; identical to SEQ ID NO: 29312
  Description of Artificial Sequence: Synthetic whey; 5' sequence and inner sequence

SEQ ID NO: 45625 - DNA, 53 bp, Artificial Sequence; identical to SEQ ID NO: 5790
  Description of Artificial Sequence: Synthetic whey; 5' sequence and inner sequence

SEQ ID NO: 45626 - DNA, 49 bp, Artificial Sequence
  Description of Artificial Sequence: Synthetic whey; 5' sequence and inner sequence
tagggaagagaaggacatatgatgtcatgccatcccttcgagtgtgaca

SEQ ID NO: 45627 - DNA, 53 bp, Artificial Sequence
  Description of Artificial Sequence: Synthetic whey; 5' sequence and inner sequence
tagggaagagaaggacatatgatggacgcaacgtaccgtatcgtgtccatgta

SEQ ID NO: 45628 - DNA, 53 bp, Artificial Sequence; identical to SEQ ID NO: 29979
  Description of Artificial Sequence: Synthetic whey; 5' sequence and inner sequence

SEQ ID NO: 45629 - DNA, 53 bp, Artificial Sequence; identical to SEQ ID NO: 1688
  Description of Artificial Sequence: Synthetic whey; 5' sequence and inner sequence

SEQ ID NO: 45630 - DNA, 53 bp, Artificial Sequence; identical to SEQ ID NO: 17677
  Description of Artificial Sequence: Synthetic whey; 5' sequence and inner sequence

SEQ ID NO: 45631 - DNA, 53 bp, Artificial Sequence; identical to SEQ ID NO: 29791
  Description of Artificial Sequence: Synthetic whey; 5' sequence and inner sequence

SEQ ID NO: 45632 - DNA, 53 bp, Artificial Sequence; identical to SEQ ID NO: 29846
  Description of Artificial Sequence: Synthetic whey; 5' sequence and inner sequence

SEQ ID NO: 45633 - DNA, 53 bp, Artificial Sequence; identical to SEQ ID NO: 1751
  Description of Artificial Sequence: Synthetic whey; 5' sequence and inner sequence

SEQ ID NO: 45634 - DNA, 53 bp, Artificial Sequence
  Description of Artificial Sequence: Synthetic whey; 5' sequence and inner sequence
tagggaagagaaggacatatgatgtacgcatcgtcccgtcatgtggttccgtg

SEQ ID NO: 45635 - DNA, 53 bp, Artificial Sequence
  Description of Artificial Sequence: Synthetic whey; 5' sequence and inner sequence
tagggaagagaaggacatatgatgtcaatgtgcctgaccgtcaagttgcggca

SEQ ID NO: 45636 - DNA, 53 bp, Artificial Sequence
  Description of Artificial Sequence: Synthetic whey; 5' sequence and inner sequence
tagggaagagaaggacatatgatgtcactgtgcctgacagtcaagttgcggca

SEQ ID NO: 45637 - DNA, 53 bp, Artificial Sequence
  Description of Artificial Sequence: Synthetic whey; 5' sequence and inner sequence
tagggaagagaaggacatatgatggccacagagtacctcaacgtggacgtgca

SEQ ID NO: 45638 - DNA, 53 bp, Artificial Sequence; identical to SEQ ID NO: 17531
  Description of Artificial Sequence: Synthetic whey; 5' sequence and inner sequence

SEQ ID NO: 45639 - DNA, 53 bp, Artificial Sequence
  Description of Artificial Sequence: Synthetic whey; 5' sequence and inner sequence
tagggaagagaaggacatatgatgtcatgccatcccttcgagtgcgtcacgta

SEQ ID NO: 45640 - DNA, 53 bp, Artificial Sequence
  Description of Artificial Sequence: Synthetic whey; 5' sequence and inner sequence
tagggaagagaaggacatatgatgtcatgccatcccttcgagtgtgacacgta

SEQ ID NO: 45641 - DNA, 53 bp, Artificial Sequence
  Description of Artificial Sequence: Synthetic whey; 5' sequence and inner sequence
tagggaagagaaggacatatgatcgtgacgatgcgtaacatacgtgctgcctc

SEQ ID NO: 45642 - DNA, 53 bp, Artificial Sequence
  Description of Artificial Sequence: Synthetic whey; 5' sequence and inner sequence
tagggaagagaaggacatatgatacgtcacggtgacgtaacggcgcgcacacg

SEQ ID NO: 45643 - DNA, 53 bp, Artificial Sequence
  Description of Artificial Sequence: Synthetic whey; 5' sequence and inner sequence
tagggaagagaaggacatatgatgtcaccgtgcctgaccgtcaagttgcggca

SEQ ID NO: 45644 - DNA, 53 bp, Artificial Sequence; identical to SEQ ID NO: 21430
  Description of Artificial Sequence: Synthetic whey; 5' sequence and inner sequence

SEQ ID NO: 45645 - DNA, 53 bp, Artificial Sequence; identical to SEQ ID NO: 21346
  Description of Artificial Sequence: Synthetic whey; 5' sequence and inner sequence

SEQ ID NO: 45646 - DNA, 53 bp, Artificial Sequence; identical to SEQ ID NO: 29705
  Description of Artificial Sequence: Synthetic whey; 5' sequence and inner sequence

SEQ ID NO: 45647 - DNA, 53 bp, Artificial Sequence; identical to SEQ ID NO: 29670
  Description of Artificial Sequence: Synthetic whey; 5' sequence and inner sequence

SEQ ID NO: 45648 - DNA, 53 bp, Artificial Sequence; identical to SEQ ID NO: 33193
  Description of Artificial Sequence: Synthetic whey; 5' sequence and inner sequence

SEQ ID NO: 45649 - DNA, 53 bp, Artificial Sequence; identical to SEQ ID NO: 21594
  Description of Artificial Sequence: Synthetic whey; 5' sequence and inner sequence

SEQ ID NO: 45650 - DNA, 53 bp, Artificial Sequence
  Description of Artificial Sequence: Synthetic whey; 5' sequence and inner sequence
tagggaagagaaggacatatgattgacgtgaggcaacgtgcagacgtgacgca

SEQ ID NO: 45651 - DNA, 53 bp, Artificial Sequence
  Description of Artificial Sequence: Synthetic whey; 5' sequence and inner sequence
tagggaagagaaggacatatgatggcactgtgcctgaccgtcaagttgcggca

SEQ ID NO: 45652 - DNA, 53 bp, Artificial Sequence
  Description of Artificial Sequence: Synthetic whey; 5' sequence and inner sequence
tagggaagagaaggacatatgatgtacgcatcgttccgtcatgtggttccgta

SEQ ID NO: 45653 - DNA, 53 bp, Artificial Sequence; identical to SEQ ID NO: 21596
  Description of Artificial Sequence: Synthetic whey; 5' sequence and inner sequence

SEQ ID NO: 45654 - DNA, 53 bp, Artificial Sequence; identical to SEQ ID NO: 21923
  Description of Artificial Sequence: Synthetic whey; 5' sequence and inner sequence

SEQ ID NO: 45655 - DNA, 53 bp, Artificial Sequence
  Description of Artificial Sequence: Synthetic whey; 5' sequence and inner sequence
tagggaagagaaggacatatgatacatcgcgtcactatcatgtgtgtcacgta

SEQ ID NO: 45656 - DNA, 53 bp, Artificial Sequence
  Description of Artificial Sequence: Synthetic whey; 5' sequence and inner sequence
tagggaagagaaggacatatgatcgatacgcaaggaccatgcgtgacttcgcg

SEQ ID NO: 45657 - DNA, 53 bp, Artificial Sequence
  Description of Artificial Sequence: Synthetic whey; 5' sequence and inner sequence
tagggaagagaaggacatatgatcgacacgtagcacggcacgtcacgtcctgc

SEQ ID NO: 45658 - DNA, 53 bp, Artificial Sequence; identical to SEQ ID NO: 33505
  Description of Artificial Sequence: Synthetic whey; 5' sequence and inner sequence

SEQ ID NO: 45659 - DNA, 53 bp, Artificial Sequence; identical to SEQ ID NO: 1998
  Description of Artificial Sequence: Synthetic whey; 5' sequence and inner sequence

SEQ ID NO: 45660 - DNA, 53 bp, Artificial Sequence; identical to SEQ ID NO: 9926
  Description of Artificial Sequence: Synthetic whey; 5' sequence and inner sequence

SEQ ID NO: 45661 - DNA, 53 bp, Artificial Sequence; identical to SEQ ID NO: 21960
  Description of Artificial Sequence: Synthetic whey; 5' sequence and inner sequence

SEQ ID NO: 45662 - DNA, 53 bp, Artificial Sequence
  Description of Artificial Sequence: Synthetic whey; 5' sequence and inner sequence
tagggaagagaaggacatatgatgtcatcccgcatcctacacgtgggcacgta

SEQ ID NO: 45663 - DNA, 53 bp, Artificial Sequence
  Description of Artificial Sequence: Synthetic whey; 5' sequence and inner sequence
tagggaagagaaggacatatgatcgacaacgtgacgtgatgtggacgtgcgcc

SEQ ID NO: 45664 - DNA, 53 bp, Artificial Sequence; identical to SEQ ID NO: 18001
  Description of Artificial Sequence: Synthetic whey; 5' sequence and inner sequence

SEQ ID NO: 45665 - DNA, 53 bp, Artificial Sequence; identical to SEQ ID NO: 1162
  Description of Artificial Sequence: Synthetic whey; 5' sequence and inner sequence

SEQ ID NO: 45666 - DNA, 53 bp, Artificial Sequence; identical to SEQ ID NO: 21831
  Description of Artificial Sequence: Synthetic whey; 5' sequence and inner sequence

SEQ ID NO: 45667 - DNA, 53 bp, Artificial Sequence; identical to SEQ ID NO: 21795
  Description of Artificial Sequence: Synthetic whey; 5' sequence and inner sequence

SEQ ID NO: 45668 - DNA, 53 bp, Artificial Sequence
  Description of Artificial Sequence: Synthetic whey; 5' sequence and inner sequence
tagggaagagaaggacatatgatggacggaacgtaccgtatcgtggccatgtg

SEQ ID NO: 45669 - DNA, 53 bp, Artificial Sequence; identical to SEQ ID NO: 1406
  Description of Artificial Sequence: Synthetic whey; 5' sequence and inner sequence

SEQ ID NO: 45670 - DNA, 53 bp, Artificial Sequence; identical to SEQ ID NO: 5837
  Description of Artificial Sequence: Synthetic whey; 5' sequence and inner sequence

SEQ ID NO: 45671 - DNA, 53 bp, Artificial Sequence; identical to SEQ ID NO: 29844
  Description of Artificial Sequence: Synthetic whey; 5' sequence and inner sequence

SEQ ID NO: 45672 - DNA, 53 bp, Artificial Sequence; identical to SEQ ID NO: 1452
  Description of Artificial Sequence: Synthetic whey; 5' sequence and inner sequence

SEQ ID NO: 45673 - DNA, 53 bp, Artificial Sequence; identical to SEQ ID NO: 1103
  Description of Artificial Sequence: Synthetic whey; 5' sequence and inner sequence

SEQ ID NO: 45674 - DNA, 53 bp, Artificial Sequence
  Description of Artificial Sequence: Synthetic whey; 5' sequence and inner sequence
tagggaagagaaggacatatgatggccatagcgtacctcaacgtggacgtgca

SEQ ID NO: 45675 - DNA, 53 bp, Artificial Sequence; identical to SEQ ID NO: 1477
  Description of Artificial Sequence: Synthetic whey; 5' sequence and inner sequence

SEQ ID NO: 45676 - DNA, 53 bp, Artificial Sequence; identical to SEQ ID NO: 17573
  Description of Artificial Sequence: Synthetic whey; 5' sequence and inner sequence

SEQ ID NO: 45677 - DNA, 53 bp, Artificial Sequence
  Description of Artificial Sequence: Synthetic whey; 5' sequence and inner sequence
tagggaagagaaggacatatgatgtcactgagcctgaccgtcaagttgcggca

SEQ ID NO: 45678 - DNA, 53 bp, Artificial Sequence
  Description of Artificial Sequence: Synthetic whey; 5' sequence and inner sequence
tagggaagagaaggacatatgatgcgtcacgatgcatccacatgtactgcgcg

SEQ ID NO: 45679 - DNA, 53 bp, Artificial Sequence; identical to SEQ ID NO: 33304
  Description of Artificial Sequence: Synthetic whey; 5' sequence and inner sequence

SEQ ID NO: 45680 - DNA, 53 bp, Artificial Sequence
  Description of Artificial Sequence: Synthetic whey; 5' sequence and inner sequence
tagggaagagaaggacatatgatcgtgacacgacacacatcgatgcatgcgcg

SEQ ID NO: 45681 - DNA, 53 bp, Artificial Sequence; identical to SEQ ID NO: 1242
  Description of Artificial Sequence: Synthetic whey; 5' sequence and inner sequence

SEQ ID NO: 45682 - DNA, 53 bp, Artificial Sequence; identical to SEQ ID NO: 1089
  Description of Artificial Sequence: Synthetic whey; 5' sequence and inner sequence

SEQ ID NO: 45683 - DNA, 53 bp, Artificial Sequence; identical to SEQ ID NO: 21815
  Description of Artificial Sequence: Synthetic whey; 5' sequence and inner sequence

SEQ ID NO: 45684 - DNA, 53 bp, Artificial Sequence; identical to SEQ ID NO: 21724
  Description of Artificial Sequence: Synthetic whey; 5' sequence and inner sequence

SEQ ID NO: 45685 - DNA, 53 bp, Artificial Sequence; identical to SEQ ID NO: 1375
  Description of Artificial Sequence: Synthetic whey; 5' sequence and inner sequence

SEQ ID NO: 45686 - DNA, 53 bp, Artificial Sequence; identical to SEQ ID NO: 1687
  Description of Artificial Sequence: Synthetic whey; 5' sequence and inner sequence

SEQ ID NO: 45687 - DNA, 53 bp, Artificial Sequence; identical to SEQ ID NO: 21650
  Description of Artificial Sequence: Synthetic whey; 5' sequence and inner sequence

SEQ ID NO: 45688 - DNA, 53 bp, Artificial Sequence
  Description of Artificial Sequence: Synthetic whey; 5' sequence and inner sequence
tagggaagagaaggacatatgatcgacgcgcagtgacgtacatgcagttcgcc

SEQ ID NO: 45689 - DNA, 53 bp, Artificial Sequence; identical to SEQ ID NO: 1128
  Description of Artificial Sequence: Synthetic whey; 5' sequence and inner sequence

SEQ ID NO: 45690 - DNA, 53 bp, Artificial Sequence
  Description of Artificial Sequence: Synthetic whey; 5' sequence and inner sequence
tagggaagagaaggacatatgatcgatgcaacgtgacgtgaccattcgccgcg

SEQ ID NO: 45691 - DNA, 53 bp, Artificial Sequence; identical to SEQ ID NO: 1171
  Description of Artificial Sequence: Synthetic whey; 5' sequence and inner sequence

SEQ ID NO: 45692 - DNA, 53 bp, Artificial Sequence; identical to SEQ ID NO: 1133
  Description of Artificial Sequence: Synthetic whey; 5' sequence and inner sequence

SEQ ID NO: 45693 - DNA, 53 bp, Artificial Sequence; identical to SEQ ID NO: 21700
  Description of Artificial Sequence: Synthetic whey; 5' sequence and inner sequence

SEQ ID NO: 45694 - DNA, 53 bp, Artificial Sequence; identical to SEQ ID NO: 1522
  Description of Artificial Sequence: Synthetic whey; 5' sequence and inner sequence

SEQ ID NO: 45695 - DNA, 53 bp, Artificial Sequence; identical to SEQ ID NO: 1991
  Description of Artificial Sequence: Synthetic whey; 5' sequence and inner sequence

SEQ ID NO: 45696 - DNA, 53 bp, Artificial Sequence
  Description of Artificial Sequence: Synthetic whey; 5' sequence and inner sequence
tagggaagagaaggacatatgatgtcatgctatcccttcgagtgtgacaggta

SEQ ID NO: 45697 - DNA, 53 bp, Artificial Sequence; identical to SEQ ID NO: 29389
  Description of Artificial Sequence: Synthetic whey; 5' sequence and inner sequence

SEQ ID NO: 45698 - DNA, 53 bp, Artificial Sequence
  Description of Artificial Sequence: Synthetic whey; 5' sequence and inner sequence
tagggaagagaaggacatatgatggacgcaccgtaccgtatcgtggccatgtg

SEQ ID NO: 45699 - DNA, 49 bp, Artificial Sequence
  Description of Artificial Sequence: Synthetic whey; 5' sequence and inner sequence
tagggaagagaaggacatatgatgtcatgccatcccttcgagtgcgtca

SEQ ID NO: 45700 - DNA, 53 bp, Artificial Sequence; identical to SEQ ID NO: 25984
  Description of Artificial Sequence: Synthetic whey; 5' sequence and inner sequence

SEQ ID NO: 45701 - DNA, 53 bp, Artificial Sequence; identical to SEQ ID NO: 1306
  Description of Artificial Sequence: Synthetic whey; 5' sequence and inner sequence

SEQ ID NO: 45702 - DNA, 53 bp, Artificial Sequence
  Description of Artificial Sequence: Synthetic whey; 5' sequence and inner sequence
tagggaagagaaggacatatgatccatcccgtcactatcatgtgtgtcacgta

SEQ ID NO: 45703 - DNA, 53 bp, Artificial Sequence; identical to SEQ ID NO: 1407
  Description of Artificial Sequence: Synthetic whey; 5' sequence and inner sequence

SEQ ID NO: 45704 - DNA, 53 bp, Artificial Sequence
  Description of Artificial Sequence: Synthetic whey; 5' sequence and inner sequence
tagggaagagaaggacatatgatggaagcaacgtaccgtatcgtggccatgtg

SEQ ID NO: 45705 - DNA, 53 bp, Artificial Sequence; identical to SEQ ID NO: 1277
  Description of Artificial Sequence: Synthetic whey; 5' sequence and inner sequence

SEQ ID NO: 45706 - DNA, 53 bp, Artificial Sequence; identical to SEQ ID NO: 29996
  Description of Artificial Sequence: Synthetic whey; 5' sequence and inner sequence

SEQ ID NO: 45707 - DNA, 53 bp, Artificial Sequence; identical to SEQ ID NO: 1663
  Description of Artificial Sequence: Synthetic whey; 5' sequence and inner sequence

SEQ ID NO: 45708 - DNA, 53 bp, Artificial Sequence; identical to SEQ ID NO: 1774
  Description of Artificial Sequence: Synthetic whey; 5' sequence and inner sequence

SEQ ID NO: 45709 - DNA, 53 bp, Artificial Sequence; identical to SEQ ID NO: 17634
  Description of Artificial Sequence: Synthetic whey; 5' sequence and inner sequence

SEQ ID NO: 45710 - DNA, 53 bp, Artificial Sequence; identical to SEQ ID NO: 1527
  Description of Artificial Sequence: Synthetic whey; 5' sequence and inner sequence

SEQ ID NO: 45711 - DNA, 53 bp, Artificial Sequence
  Description of Artificial Sequence: Synthetic whey; 5' sequence and inner sequence
tagggaagagaaggacatatgatcatgcatgacgacgatgcgccttgttcacg

SEQ ID NO: 45712 - DNA, 53 bp, Artificial Sequence; identical to SEQ ID NO: 1112
  Description of Artificial Sequence: Synthetic whey; 5' sequence and inner sequence

SEQ ID NO: 45713 - DNA, 53 bp, Artificial Sequence; identical to SEQ ID NO: 17342
  Description of Artificial Sequence: Synthetic whey; 5' sequence and inner sequence

SEQ ID NO: 45714 - DNA, 53 bp, Artificial Sequence; identical to SEQ ID NO: 1223
  Description of Artificial Sequence: Synthetic whey; 5' sequence and inner sequence

SEQ ID NO: 45715 - DNA, 53 bp, Artificial Sequence
  Description of Artificial Sequence: Synthetic whey; 5' sequence and inner sequence
tagggaagagaaggacatatgatcgtgcgtgacgatgcgaacgtggctacgcg

SEQ ID NO: 45716 - DNA, 53 bp, Artificial Sequence; identical to SEQ ID NO: 21545
  Description of Artificial Sequence: Synthetic whey; 5' sequence and inner sequence

SEQ ID NO: 45717 - DNA, 53 bp, Artificial Sequence; identical to SEQ ID NO: 21307
  Description of Artificial Sequence: Synthetic whey; 5' sequence and inner sequence

SEQ ID NO: 45718 - DNA, 53 bp, Artificial Sequence; identical to SEQ ID NO: 21793
  Description of Artificial Sequence: Synthetic whey; 5' sequence and inner sequence

SEQ ID NO: 45719 - DNA, 53 bp, Artificial Sequence; identical to SEQ ID NO: 29668
  Description of Artificial Sequence: Synthetic whey; 5' sequence and inner sequence

SEQ ID NO: 45720 - DNA, 53 bp, Artificial Sequence; identical to SEQ ID NO: 29750
  Description of Artificial Sequence: Synthetic whey; 5' sequence and inner sequence

SEQ ID NO: 45721 - DNA, 53 bp, Artificial Sequence; identical to SEQ ID NO: 21673
  Description of Artificial Sequence: Synthetic whey; 5' sequence and inner sequence

SEQ ID NO: 45722 - DNA, 53 bp, Artificial Sequence
  Description of Artificial Sequence: Synthetic whey; 5' sequence and inner sequence
tagggaagagaaggacatatgatcgacaacgaggcacgttacgtcacgtcacg

SEQ ID NO: 45723 - DNA, 53 bp, Artificial Sequence
  Description of Artificial Sequence: Synthetic whey; 5' sequence and inner sequence
tagggaagagaaggacatatgatggccacagcgtacctcaacgtggacgttca

SEQ ID NO: 45724 - DNA, 53 bp, Artificial Sequence
  Description of Artificial Sequence: Synthetic whey; 5' sequence and inner sequence
tagggaagagaaggacatatgatccatcgagtcactatcatgtgtgtcacgta

SEQ ID NO: 45725 - DNA, 53 bp, Artificial Sequence; identical to SEQ ID NO: 21518
  Description of Artificial Sequence: Synthetic whey; 5' sequence and inner sequence

SEQ ID NO: 45726 - DNA, 53 bp, Artificial Sequence
  Description of Artificial Sequence: Synthetic whey; 5' sequence and inner sequence
tagggaagagaaggacatatgatcgtggcaacgtacgtacgtcaccttgcgcg

SEQ ID NO: 45727 - DNA, 53 bp, Artificial Sequence; identical to SEQ ID NO: 21644
  Description of Artificial Sequence: Synthetic whey; 5' sequence and inner sequence

SEQ ID NO: 45728 - DNA, 53 bp, Artificial Sequence
  Description of Artificial Sequence: Synthetic whey; 5' sequence and inner sequence
tagggaagagaaggacatatgatttcactgtgcctgaccgtcaagttgcggca

SEQ ID NO: 45729 - DNA, 53 bp, Artificial Sequence; identical to SEQ ID NO: 1561
  Description of Artificial Sequence: Synthetic whey; 5' sequence and inner sequence

SEQ ID NO: 45730 - DNA, 53 bp, Artificial Sequence; identical to SEQ ID NO: 29915
  Description of Artificial Sequence: Synthetic whey; 5' sequence and inner sequence

SEQ ID NO: 45731 - DNA, 53 bp, Artificial Sequence; identical to SEQ ID NO: 21970
  Description of Artificial Sequence: Synthetic whey; 5' sequence and inner sequence

SEQ ID NO: 45732 - DNA, 53 bp, Artificial Sequence
  Description of Artificial Sequence: Synthetic whey; 5' sequence and inner sequence
tagggaagagaaggacatatgatgcgaacagcacgtacgtcactgcgcgtgcc

SEQ ID NO: 45733 - DNA, 53 bp, Artificial Sequence
  Description of Artificial Sequence: Synthetic whey; 5' sequence and inner sequence
tagggaagagaaggacatatgatgtcactgtgcctgaccggcaagttgcggca

SEQ ID NO: 45734 - DNA, 53 bp, Artificial Sequence; identical to SEQ ID NO: 17504
  Description of Artificial Sequence: Synthetic whey; 5' sequence and inner sequence

SEQ ID NO: 45735 - DNA, 53 bp, Artificial Sequence; identical to SEQ ID NO: 5489
  Description of Artificial Sequence: Synthetic whey; 5' sequence and inner sequence

SEQ ID NO: 45736 - DNA, 53 bp, Artificial Sequence
  Description of Artificial Sequence: Synthetic whey; 5' sequence and inner sequence
tagggaagagaaggacatatgatgtcatgccatcccttagagtgtgacaggta

SEQ ID NO: 45737 - DNA, 53 bp, Artificial Sequence
  Description of Artificial Sequence: Synthetic whey; 5' sequence and inner sequence
tagggaagagaaggacatatgatgaccacagcgtacctcaacgtggacgtgca

SEQ ID NO: 45738 - DNA, 53 bp, Artificial Sequence
  Description of Artificial Sequence: Synthetic whey; 5' sequence and inner sequence
tagggaagagaaggacatatgatacgcatgcagaccgtaacgtacagtgcgcg

SEQ ID NO: 45739 - DNA, 53 bp, Artificial Sequence
  Description of Artificial Sequence: Synthetic whey; 5' sequence and inner sequence
tagggaagagaaggacatatgatacgtcacgcacagcgtcacgttccgatgcg

SEQ ID NO: 45740 - DNA, 53 bp, Artificial Sequence
  Description of Artificial Sequence: Synthetic whey; 5' sequence and inner sequence
tagggaagagaaggacatatgatcatggcaacgacgcatggtacggcagcacg

SEQ ID NO: 45741 - DNA, 53 bp, Artificial Sequence
  Description of Artificial Sequence: Synthetic whey; 5' sequence and inner sequence
tagggaagagaaggacatatgatggtacgcagtcacgcagcaacgtcgtcacg

SEQ ID NO: 45742 - DNA, 53 bp, Artificial Sequence
  Description of Artificial Sequence: Synthetic whey; 5' sequence and inner sequence
tagggaagagaaggacatatgatcgatacgtatcgcgtcgtccatccgtcacg

SEQ ID NO: 45743 - DNA, 53 bp, Artificial Sequence; identical to SEQ ID NO: 21475
  Description of Artificial Sequence: Synthetic whey; 5' sequence and inner sequence

SEQ ID NO: 45744 - DNA, 53 bp, Artificial Sequence
  Description of Artificial Sequence: Synthetic whey; 5' sequence and inner sequence
tagggaagagaaggacatatgatggacgcaacgtaacgtatcgtggccatgtg

SEQ ID NO: 45745 - DNA, 53 bp, Artificial Sequence
  Description of Artificial Sequence: Synthetic whey; 5' sequence and inner sequence
tagggaagagaaggacatatgatgtcactgtgcctgaccgtcaagttccggca

SEQ ID NO: 45746 - DNA, 53 bp, Artificial Sequence; identical to SEQ ID NO: 21648
  Description of Artificial Sequence: Synthetic whey; 5' sequence and inner sequence

SEQ ID NO: 45747 - DNA, 53 bp, Artificial Sequence; identical to SEQ ID NO: 21884
  Description of Artificial Sequence: Synthetic whey; 5' sequence and inner sequence

SEQ ID NO: 45748 - DNA, 53 bp, Artificial Sequence; identical to SEQ ID NO: 29771
  Description of Artificial Sequence: Synthetic whey; 5' sequence and inner sequence

SEQ ID NO: 45749 - DNA, 53 bp, Artificial Sequence; identical to SEQ ID NO: 21413
  Description of Artificial Sequence: Synthetic whey; 5' sequence and inner sequence

SEQ ID NO: 45750 - DNA, 53 bp, Artificial Sequence; identical to SEQ ID NO: 29620
  Description of Artificial Sequence: Synthetic whey; 5' sequence and inner sequence

SEQ ID NO: 45751 - DNA, 53 bp, Artificial Sequence
  Description of Artificial Sequence: Synthetic whey; 5' sequence and inner sequence
tagggaagagaaggacatatgatcgtgccaacgtaatgccacgtcacctcacg

SEQ ID NO: 45752 - DNA, 53 bp, Artificial Sequence
  Description of Artificial Sequence: Synthetic whey; 5' sequence and inner sequence
tagggaagagaaggacatatgatggacgcagcgtaacgttcgagtggcacgta

SEQ ID NO: 45753 - DNA, 53 bp, Artificial Sequence
  Description of Artificial Sequence: Synthetic whey; 5' sequence and inner sequence
tagggaagagaaggacatatgatcgtgacgtacgcaacacatcgtcctacgca

SEQ ID NO: 45754 - DNA, 53 bp, Artificial Sequence; identical to SEQ ID NO: 17804
  Description of Artificial Sequence: Synthetic whey; 5' sequence and inner sequence

SEQ ID NO: 45755 - DNA, 51 bp, Artificial Sequence; identical to SEQ ID NO: 21321
  Description of Artificial Sequence: Synthetic whey; 5' sequence and inner sequence

SEQ ID NO: 45756 - DNA, 53 bp, Artificial Sequence; identical to SEQ ID NO: 21666
  Description of Artificial Sequence: Synthetic whey; 5' sequence and inner sequence

SEQ ID NO: 45757 - DNA, 53 bp, Artificial Sequence; identical to SEQ ID NO: 1278
  Description of Artificial Sequence: Synthetic whey; 5' sequence and inner sequence

SEQ ID NO: 45758 - DNA, 53 bp, Artificial Sequence
  Description of Artificial Sequence: Synthetic whey; 5' sequence and inner sequence
tagggaagagaaggacatatgatacgatcagcacgcactacaacgtacgcacg

SEQ ID NO: 45759 - DNA, 53 bp, Artificial Sequence; identical to SEQ ID NO: 5230
  Description of Artificial Sequence: Synthetic whey; 5' sequence and inner sequence

SEQ ID NO: 45760 - DNA, 53 bp, Artificial Sequence; identical to SEQ ID NO: 1576
  Description of Artificial Sequence: Synthetic whey; 5' sequence and inner sequence

SEQ ID NO: 45761 - DNA, 54 bp, Artificial Sequence
  Description of Artificial Sequence: Synthetic whey; 5' sequence and inner sequence
tagggaagagaaggacatatgatacgatgcgtaccgatgcgtatgtcgtgcaca

SEQ ID NO: 45762 - DNA, 53 bp, Artificial Sequence; identical to SEQ ID NO: 17988
  Description of Artificial Sequence: Synthetic whey; 5' sequence and inner sequence

SEQ ID NO: 45763 - DNA, 53 bp, Artificial Sequence; identical to SEQ ID NO: 1567
  Description of Artificial Sequence: Synthetic whey; 5' sequence and inner sequence

SEQ ID NO: 45764 - DNA, 53 bp, Artificial Sequence; identical to SEQ ID NO: 6000
  Description of Artificial Sequence: Synthetic whey; 5' sequence and inner sequence

SEQ ID NO: 45765 - DNA, 53 bp, Artificial Sequence
  Description of Artificial Sequence: Synthetic whey; 5' sequence and inner sequence
tagggaagagaaggacatatgatcgatggcagaccgtgacgctacgtaacgcg

SEQ ID NO: 45766 - DNA, 52 bp, Artificial Sequence
  Description of Artificial Sequence: Synthetic whey; 5' sequence and inner sequence
tagggaagagaaggacatatgatcgtaccgcaagtgacgtgtccgtgccgtg

SEQ ID NO: 45767 - DNA, 53 bp, Artificial Sequence
  Description of Artificial Sequence: Synthetic whey; 5' sequence and inner sequence
tagggaagagaaggacatatgatgtacgcatcgtcccgtcatgtggttctgta

SEQ ID NO: 45768 - DNA, 53 bp, Artificial Sequence
  Description of Artificial Sequence: Synthetic whey; 5' sequence and inner sequence
tagggaagagaaggacatatgataacgtgcgcgacgtaacgtatgcaccgtgc

SEQ ID NO: 45769 - DNA, 53 bp, Artificial Sequence; identical to SEQ ID NO: 17457
  Description of Artificial Sequence: Synthetic whey; 5' sequence and inner sequence

SEQ ID NO: 45770 - DNA, 53 bp, Artificial Sequence
  Description of Artificial Sequence: Synthetic whey; 5' sequence and inner sequence
tagggaagagaaggacatatgatacgtcaacatgtcgcagttcgtaacgcaca

SEQ ID NO: 45771 - DNA, 53 bp, Artificial Sequence
  Description of Artificial Sequence: Synthetic whey; 5' sequence and inner sequence
tagggaagagaaggacatatgatggccacagcgtacctcaacgtggacgtaca

SEQ ID NO: 45772 - DNA, 53 bp, Artificial Sequence
  Description of Artificial Sequence: Synthetic whey; 5' sequence and inner sequence
tagggaagagaaggacatatgatgtcactgtgcctgaacgtcaagttgcggca

SEQ ID NO: 45773 - DNA, 53 bp, Artificial Sequence; identical to SEQ ID NO: 29984
  Description of Artificial Sequence: Synthetic whey; 5' sequence and inner sequence

SEQ ID NO: 45774 - DNA, 53 bp, Artificial Sequence
  Description of Artificial Sequence: Synthetic whey; 5' sequence and inner sequence
tagggaagagaaggacatatgataggcacagcgcagtgtcacgttccgatgcg

SEQ ID NO: 45775 - DNA, 53 bp, Artificial Sequence; identical to SEQ ID NO: 21690
  Description of Artificial Sequence: Synthetic whey; 5' sequence and inner sequence

SEQ ID NO: 45776 - DNA, 53 bp, Artificial Sequence; identical to SEQ ID NO: 1253
  Description of Artificial Sequence: Synthetic whey; 5' sequence and inner sequence

SEQ ID NO: 45777 - DNA, 53 bp, Artificial Sequence
  Description of Artificial Sequence: Synthetic whey; 5' sequence and inner sequence
tagggaagagaaggacatatgatcgtgacgacggaacgtgcgtatggtacgca

SEQ ID NO: 45778 - DNA, 53 bp, Artificial Sequence; identical to SEQ ID NO: 1883
  Description of Artificial Sequence: Synthetic whey; 5' sequence and inner sequence

SEQ ID NO: 45779 - DNA, 53 bp, Artificial Sequence; identical to SEQ ID NO: 1943
  Description of Artificial Sequence: Synthetic whey; 5' sequence and inner sequence

SEQ ID NO: 45780 - DNA, 53 bp, Artificial Sequence
  Description of Artificial Sequence: Synthetic whey; 5' sequence and inner sequence
tagggaagagaaggacatatgatcgtgcgcaacgacatgtcactgactgcgcg

SEQ ID NO: 45781 - DNA, 53 bp, Artificial Sequence
  Description of Artificial Sequence: Synthetic whey; 5' sequence and inner sequence
tagggaagagaaggacatatgatggacgcaacgtacagtatcgtggccatgtg

SEQ ID NO: 45782 - DNA, 53 bp, Artificial Sequence
  Description of Artificial Sequence: Synthetic whey; 5' sequence and inner sequence
tagggaagagaaggacatatgatgcgtacggaatggacgtcctgcgctgcacg

SEQ ID NO: 45783 - DNA, 53 bp, Artificial Sequence; identical to SEQ ID NO: 29864
  Description of Artificial Sequence: Synthetic whey; 5' sequence and inner sequence

SEQ ID NO: 45784 - DNA, 53 bp, Artificial Sequence; identical to SEQ ID NO: 9949
  Description of Artificial Sequence: Synthetic whey; 5' sequence and inner sequence

SEQ ID NO: 45785 - DNA, 53 bp, Artificial Sequence; identical to SEQ ID NO: 1331
  Description of Artificial Sequence: Synthetic whey; 5' sequence and inner sequence

SEQ ID NO: 45786 - DNA, 53 bp, Artificial Sequence; identical to SEQ ID NO: 1529
  Description of Artificial Sequence: Synthetic whey; 5' sequence and inner sequence

SEQ ID NO: 45787 - DNA, 53 bp, Artificial Sequence
  Description of Artificial Sequence: Synthetic whey; 5' sequence and inner sequence
tagggaagagaaggacatatgatgtcactgtgcctgaccgtcaagctgcggca

SEQ ID NO: 45788 - DNA, 53 bp, Artificial Sequence; identical to SEQ ID NO: 21820
  Description of Artificial Sequence: Synthetic whey; 5' sequence and inner sequence

SEQ ID NO: 45789 - DNA, 53 bp, Artificial Sequence; identical to SEQ ID NO: 9782
  Description of Artificial Sequence: Synthetic whey; 5' sequence and inner sequence

SEQ ID NO: 45790 - DNA, 53 bp, Artificial Sequence; identical to SEQ ID NO: 1360
  Description of Artificial Sequence: Synthetic whey; 5' sequence and inner sequence

SEQ ID NO: 45791 - DNA, 53 bp, Artificial Sequence; identical to SEQ ID NO: 41519
  Description of Artificial Sequence: Synthetic whey; 5' sequence and inner sequence

SEQ ID NO: 45792 - DNA, 53 bp, Artificial Sequence; identical to SEQ ID NO: 9993
  Description of Artificial Sequence: Synthetic whey; 5' sequence and inner sequence

SEQ ID NO: 45793 - DNA, 53 bp, Artificial Sequence; identical to SEQ ID NO: 17412
  Description of Artificial Sequence: Synthetic whey; 5' sequence and inner sequence

SEQ ID NO: 45794 - DNA, 53 bp, Artificial Sequence
  Description of Artificial Sequence: Synthetic whey; 5' sequence and inner sequence
tagggaagagaaggacatatgatgcgagacaacgcgaaccgttacgatgcacg

SEQ ID NO: 45795 - DNA, 53 bp, Artificial Sequence; identical to SEQ ID NO: 9618
  Description of Artificial Sequence: Synthetic whey; 5' sequence and inner sequence

SEQ ID NO: 45796 - DNA, 53 bp, Artificial Sequence
  Description of Artificial Sequence: Synthetic whey; 5' sequence and inner sequence
tagggaagagaaggacatatgatacgtcacacgcgttgcatcgatgcgttgcg

SEQ ID NO: 45797 - DNA, 53 bp, Artificial Sequence
  Description of Artificial Sequence: Synthetic whey; 5' sequence and inner sequence
tagggaagagaaggacatatgatacgcaacgcaatgtacgcacatgatgcacg

SEQ ID NO: 45798 - DNA, 53 bp, Artificial Sequence
  Description of Artificial Sequence: Synthetic whey; 5' sequence and inner sequence
tagggaagagaaggacatatgatcgtgtgcagcacaaggacgtacgcactgcc

SEQ ID NO: 45799 - DNA, 53 bp, Artificial Sequence; identical to SEQ ID NO: 1531
  Description of Artificial Sequence: Synthetic whey; 5' sequence and inner sequence

SEQ ID NO: 45800 - DNA, 53 bp, Artificial Sequence; identical to SEQ ID NO: 21661
  Description of Artificial Sequence: Synthetic whey; 5' sequence and inner sequence

SEQ ID NO: 45801 - DNA, 53 bp, Artificial Sequence; identical to SEQ ID NO: 29964
  Description of Artificial Sequence: Synthetic whey; 5' sequence and inner sequence

SEQ ID NO: 45802 - DNA, 53 bp, Artificial Sequence; identical to SEQ ID NO: 1563
  Description of Artificial Sequence: Synthetic whey; 5' sequence and inner sequence

SEQ ID NO: 45803 - DNA, 53 bp, Artificial Sequence
  Description of Artificial Sequence: Synthetic whey; 5' sequence and inner sequence
tagggaagagaaggacatatgatgtcactgtccctgaccgtcaagttgcggca

SEQ ID NO: 45804 - DNA, 53 bp, Artificial Sequence
  Description of Artificial Sequence: Synthetic whey; 5' sequence and inner sequence
tagggaagagaaggacatatgatcacgtacggatgcaacgtagcatgtgcgta

SEQ ID NO: 45805 - DNA, 53 bp, Artificial Sequence
  Description of Artificial Sequence: Synthetic whey; 5' sequence and inner sequence
tagggaagagaaggacatatgatacgatgcgacgtgccattgcgtacgatgcg

SEQ ID NO: 45806 - DNA, 53 bp, Artificial Sequence; identical to SEQ ID NO: 1628
  Description of Artificial Sequence: Synthetic whey; 5' sequence and inner sequence

SEQ ID NO: 45807 - DNA, 53 bp, Artificial Sequence; identical to SEQ ID NO: 1428
  Description of Artificial Sequence: Synthetic whey; 5' sequence and inner sequence

SEQ ID NO: 45808 - DNA, 53 bp, Artificial Sequence; identical to SEQ ID NO: 29425
  Description of Artificial Sequence: Synthetic whey; 5' sequence and inner sequence

SEQ ID NO: 45809 - DNA, 53 bp, Artificial Sequence; identical to SEQ ID NO: 1055
  Description of Artificial Sequence: Synthetic whey; 5' sequence and inner sequence

SEQ ID NO: 45810 - DNA, 53 bp, Artificial Sequence; identical to SEQ ID NO: 33379
  Description of Artificial Sequence: Synthetic whey; 5' sequence and inner sequence

SEQ ID NO: 45811 - DNA, 53 bp, Artificial Sequence; identical to SEQ ID NO: 1275
  Description of Artificial Sequence: Synthetic whey; 5' sequence and inner sequence

SEQ ID NO: 45812 - DNA, 53 bp, Artificial Sequence; identical to SEQ ID NO: 13700
  Description of Artificial Sequence: Synthetic whey; 5' sequence and inner sequence

SEQ ID NO: 45813 - DNA, 53 bp, Artificial Sequence; identical to SEQ ID NO: 13945
  Description of Artificial Sequence: Synthetic whey; 5' sequence and inner sequence

SEQ ID NO: 45814 - DNA, 53 bp, Artificial Sequence; identical to SEQ ID NO: 21576
  Description of Artificial Sequence: Synthetic whey; 5' sequence and inner sequence

SEQ ID NO: 45815 - DNA, 53 bp, Artificial Sequence; identical to SEQ ID NO: 21701
  Description of Artificial Sequence: Synthetic whey; 5' sequence and inner sequence

SEQ ID NO: 45816 - DNA, 53 bp, Artificial Sequence
  Description of Artificial Sequence: Synthetic whey; 5' sequence and inner sequence
tagggaagagaaggacatatgatcacgcaacgtacgatcgtagtgtcgttggc

SEQ ID NO: 45817 - DNA, 53 bp, Artificial Sequence
  Description of Artificial Sequence: Synthetic whey; 5' sequence and inner sequence
tagggaagagaaggacatatgatcgtaccgcaagtgacgtgtccgtgccgtgt

SEQ ID NO: 45818 - DNA, 53 bp, Artificial Sequence; identical to SEQ ID NO: 1168
  Description of Artificial Sequence: Synthetic whey; 5' sequence and inner sequence

SEQ ID NO: 45819 - DNA, 53 bp, Artificial Sequence
  Description of Artificial Sequence: Synthetic whey; 5' sequence and inner sequence
tagggaagagaaggacatatgatcacgtcagacacatcgtccgttacgtcacg

SEQ ID NO: 45820 - DNA, 53 bp, Artificial Sequence
  Description of Artificial Sequence: Synthetic whey; 5' sequence and inner sequence
tagggaagagaaggacatatgatgcactactcgcaccctatcatgtaggcatg

SEQ ID NO: 45821 - DNA, 53 bp, Artificial Sequence
  Description of Artificial Sequence: Synthetic whey; 5' sequence and inner sequence
tagggaagagaaggacatatgatccatcgcgtccctatcatgtgtgtcacgta

SEQ ID NO: 45822 - DNA, 53 bp, Artificial Sequence; identical to SEQ ID NO: 14002
  Description of Artificial Sequence: Synthetic whey; 5' sequence and inner sequence

SEQ ID NO: 45823 - DNA, 53 bp, Artificial Sequence; identical to SEQ ID NO: 21353
  Description of Artificial Sequence: Synthetic whey; 5' sequence and inner sequence

SEQ ID NO: 45824 - DNA, 53 bp, Artificial Sequence; identical to SEQ ID NO: 29659
  Description of Artificial Sequence: Synthetic whey; 5' sequence and inner sequence

SEQ ID NO: 45825 - DNA, 53 bp, Artificial Sequence
  Description of Artificial Sequence: Synthetic whey; 5' sequence and inner sequence
tagggaagagaaggacatatgatgtcactgtgcttgaccgtcaagttgcggca

SEQ ID NO: 45826 - DNA, 53 bp, Artificial Sequence; identical to SEQ ID NO: 1257
  Description of Artificial Sequence: Synthetic whey; 5' sequence and inner sequence

SEQ ID NO: 45827 - DNA, 53 bp, Artificial Sequence; identical to SEQ ID NO: 1809
  Description of Artificial Sequence: Synthetic whey; 5' sequence and inner sequence

SEQ ID NO: 45828 - DNA, 53 bp, Artificial Sequence; identical to SEQ ID NO: 1583
  Description of Artificial Sequence: Synthetic whey; 5' sequence and inner sequence

SEQ ID NO: 45829 - DNA, 53 bp, Artificial Sequence; identical to SEQ ID NO: 29114
  Description of Artificial Sequence: Synthetic whey; 5' sequence and inner sequence

SEQ ID NO: 45830 - DNA, 53 bp, Artificial Sequence
  Description of Artificial Sequence: Synthetic whey; 5' sequence and inner sequence
tagggaagagaaggacatatgatgtcatgccaccccttcgagtgtgacaggta

SEQ ID NO: 45831 - DNA, 53 bp, Artificial Sequence; identical to SEQ ID NO: 21692
  Description of Artificial Sequence: Synthetic whey; 5' sequence and inner sequence

SEQ ID NO: 45832 - DNA, 53 bp, Artificial Sequence; identical to SEQ ID NO: 1311
  Description of Artificial Sequence: Synthetic whey; 5' sequence and inner sequence

SEQ ID NO: 45833 - DNA, 53 bp, Artificial Sequence
  Description of Artificial Sequence: Synthetic whey; 5' sequence and inner sequence
tagggaagagaaggacatatgatcgtgacagcatcgtacgtacggaccgcgcg

SEQ ID NO: 45834 - DNA, 53 bp, Artificial Sequence
  Description of Artificial Sequence: Synthetic whey; 5' sequence and inner sequence
tagggaagagaaggacatatgatggacgcaacgaaccgtatcgtggccatgta

SEQ ID NO: 45835 - DNA, 53 bp, Artificial Sequence
  Description of Artificial Sequence: Synthetic whey; 5' sequence and inner sequence
tagggaagagaaggacatatgatgcacgactcgcaccctatcatgagggcatg

SEQ ID NO: 45836 - DNA, 53 bp, Artificial Sequence; identical to SEQ ID NO: 37827
  Description of Artificial Sequence: Synthetic whey; 5' sequence and inner sequence

SEQ ID NO: 45837 - DNA, 53 bp, Artificial Sequence
  Description of Artificial Sequence: Synthetic whey; 5' sequence and inner sequence
tagggaagagaaggacatatgatgtcactgtgcctgaccgtcaagttgcggcg

SEQ ID NO: 45838 - DNA, 53 bp, Artificial Sequence
  Description of Artificial Sequence: Synthetic whey; 5' sequence and inner sequence
tagggaagagaaggacatatgatggacgcaacgtaccgtatcgtggacatgtg

SEQ ID NO: 45839 - DNA, 53 bp, Artificial Sequence
  Description of Artificial Sequence: Synthetic whey; 5' sequence and inner sequence
tagggaagagaaggacatatgatgtcatgccatcccttcgagtgtgataggta

SEQ ID NO: 45840 - DNA, 53 bp, Artificial Sequence; identical to SEQ ID NO: 21797
  Description of Artificial Sequence: Synthetic whey; 5' sequence and inner sequence

SEQ ID NO: 45841 - DNA, 53 bp, Artificial Sequence
  Description of Artificial Sequence: Synthetic whey; 5' sequence and inner sequence
tagggaagagaaggacatatgatggacgcaacgtaccgtatcgtggccacgtg

SEQ ID NO: 45842 - DNA, 53 bp, Artificial Sequence; identical to SEQ ID NO: 17612
  Description of Artificial Sequence: Synthetic whey; 5' sequence and inner sequence

SEQ ID NO: 45843 - DNA, 53 bp, Artificial Sequence
  Description of Artificial Sequence: Synthetic whey; 5' sequence and inner sequence
tagggaagagaaggacatatgatcgtgacgcgatggtgacgtaccttgccgta

SEQ ID NO: 45844 - DNA, 53 bp, Artificial Sequence; identical to SEQ ID NO: 29737
  Description of Artificial Sequence: Synthetic whey; 5' sequence and inner sequence

SEQ ID NO: 45845 - DNA, 53 bp, Artificial Sequence
  Description of Artificial Sequence: Synthetic whey; 5' sequence and inner sequence
tagggaagagaaggacatatgatgcgcgaacgacctgcatgtacgttgacgcg

SEQ ID NO: 45846 - DNA, 53 bp, Artificial Sequence
  Description of Artificial Sequence: Synthetic whey; 5' sequence and inner sequence
tagggaagagaaggacatatgatcacgacgtacgtgacgctatgcactgcgtg

SEQ ID NO: 45847 - DNA, 53 bp, Artificial Sequence; identical to SEQ ID NO: 21415
  Description of Artificial Sequence: Synthetic whey; 5' sequence and inner sequence

SEQ ID NO: 45848 - DNA, 53 bp, Artificial Sequence; identical to SEQ ID NO: 21952
  Description of Artificial Sequence: Synthetic whey; 5' sequence and inner sequence

SEQ ID NO: 45849 - DNA, 53 bp, Artificial Sequence
  Description of Artificial Sequence: Synthetic whey; 5' sequence and inner sequence
tagggaagagaaggacatatgatcgtgcgagacgatgttggcgtgacgtcgcg

SEQ ID NO: 45850 - DNA, 53 bp, Artificial Sequence; identical to SEQ ID NO: 1269
  Description of Artificial Sequence: Synthetic whey; 5' sequence and inner sequence

SEQ ID NO: 45851 - DNA, 53 bp, Artificial Sequence; identical to SEQ ID NO: 9401
  Description of Artificial Sequence: Synthetic whey; 5' sequence and inner sequence

SEQ ID NO: 45852 - DNA, 53 bp, Artificial Sequence; identical to SEQ ID NO: 1507
  Description of Artificial Sequence: Synthetic whey; 5' sequence and inner sequence

SEQ ID NO: 45853 - DNA, 53 bp, Artificial Sequence
  Description of Artificial Sequence: Synthetic whey; 5' sequence and inner sequence
tagggaagagaaggacatatgatgttacgcagtgacgcatcacgtacgccacc

SEQ ID NO: 45854 - DNA, 53 bp, Artificial Sequence; identical to SEQ ID NO: 1039
  Description of Artificial Sequence: Synthetic whey; 5' sequence and inner sequence

SEQ ID NO: 45855 - DNA, 53 bp, Artificial Sequence
  Description of Artificial Sequence: Synthetic whey; 5' sequence and inner sequence
tagggaagagaaggacatatgatcgtgcacagtcacgttggcacatcgtcaca

SEQ ID NO: 45856 - DNA, 53 bp, Artificial Sequence
  Description of Artificial Sequence: Synthetic whey; 5' sequence and inner sequence
tagggaagagaaggacatatgatgtcactgtacctgaccgtcaagttgcggca

SEQ ID NO: 45857 - DNA, 53 bp, Artificial Sequence; identical to SEQ ID NO: 17703
  Description of Artificial Sequence: Synthetic whey; 5' sequence and inner sequence

SEQ ID NO: 45858 - DNA, 53 bp, Artificial Sequence; identical to SEQ ID NO: 21913
  Description of Artificial Sequence: Synthetic whey; 5' sequence and inner sequence

SEQ ID NO: 45859 - DNA, 53 bp, Artificial Sequence
  Description of Artificial Sequence: Synthetic whey; 5' sequence and inner sequence
tagggaagagaaggacatatgatacgtgacgcagcgtagtatcgtactgcaca

SEQ ID NO: 45860 - DNA, 53 bp, Artificial Sequence; identical to SEQ ID NO: 1234
  Description of Artificial Sequence: Synthetic whey; 5' sequence and inner sequence

SEQ ID NO: 45861 - DNA, 53 bp, Artificial Sequence; identical to SEQ ID NO: 29603
  Description of Artificial Sequence: Synthetic whey; 5' sequence and inner sequence

SEQ ID NO: 45862 - DNA, 53 bp, Artificial Sequence; identical to SEQ ID NO: 17949
  Description of Artificial Sequence: Synthetic whey; 5' sequence and inner sequence

SEQ ID NO: 45863 - DNA, 53 bp, Artificial Sequence; identical to SEQ ID NO: 1909
  Description of Artificial Sequence: Synthetic whey; 5' sequence and inner sequence

SEQ ID NO: 45864 - DNA, 53 bp, Artificial Sequence
  Description of Artificial Sequence: Synthetic whey; 5' sequence and inner sequence
tagggaagagaaggacatatgatcgtacggcaccacgcatacgtcacttcggc

SEQ ID NO: 45865 - DNA, 53 bp, Artificial Sequence
  Description of Artificial Sequence: Synthetic whey; 5' sequence and inner sequence
tagggaagagaaggacatatgatcgttacgcaacacaaacgtacgcatgcacg

SEQ ID NO: 45866 - DNA, 53 bp, Artificial Sequence; identical to SEQ ID NO: 1756
  Description of Artificial Sequence: Synthetic whey; 5' sequence and inner sequence

SEQ ID NO: 45867 - DNA, 53 bp, Artificial Sequence; identical to SEQ ID NO: 17966
  Description of Artificial Sequence: Synthetic whey; 5' sequence and inner sequence

SEQ ID NO: 45868 - DNA, 53 bp, Artificial Sequence; identical to SEQ ID NO: 1120
  Description of Artificial Sequence: Synthetic whey; 5' sequence and inner sequence

SEQ ID NO: 45869 - DNA, 53 bp, Artificial Sequence; identical to SEQ ID NO: 1292
  Description of Artificial Sequence: Synthetic whey; 5' sequence and inner sequence

SEQ ID NO: 45870 - DNA, 53 bp, Artificial Sequence; identical to SEQ ID NO: 17979
  Description of Artificial Sequence: Synthetic whey; 5' sequence and inner sequence

SEQ ID NO: 45871 - DNA, 53 bp, Artificial Sequence; identical to SEQ ID NO: 21669
  Description of Artificial Sequence: Synthetic whey; 5' sequence and inner sequence

SEQ ID NO: 45872 - DNA, 53 bp, Artificial Sequence; identical to SEQ ID NO: 17655
  Description of Artificial Sequence: Synthetic whey; 5' sequence and inner sequence

SEQ ID NO: 45873 - DNA, 53 bp, Artificial Sequence
  Description of Artificial Sequence: Synthetic whey; 5' sequence and inner sequence
tagggaagagaaggacatatgatcgtacggtacggcgatggaggtacgtcgcg

SEQ ID NO: 45874 - DNA, 53 bp, Artificial Sequence
  Description of Artificial Sequence: Synthetic whey; 5' sequence and inner sequence
tagggaagagaaggacatatgatggccacagcgtacctcaacgtggacgtgga

SEQ ID NO: 45875 - DNA, 53 bp, Artificial Sequence; identical to SEQ ID NO: 21598
  Description of Artificial Sequence: Synthetic whey; 5' sequence and inner sequence

SEQ ID NO: 45876 - DNA, 53 bp, Artificial Sequence; identical to SEQ ID NO: 29412
  Description of Artificial Sequence: Synthetic whey; 5' sequence and inner sequence

SEQ ID NO: 45877 - DNA, 53 bp, Artificial Sequence; identical to SEQ ID NO: 21668
  Description of Artificial Sequence: Synthetic whey; 5' sequence and inner sequence

SEQ ID NO: 45878 - DNA, 53 bp, Artificial Sequence
  Description of Artificial Sequence: Synthetic whey; 5' sequence and inner sequence
tagggaagagaaggacatatgatggacgcagcgtaccgtatcgtggccatgtg

SEQ ID NO: 45879 - DNA, 53 bp, Artificial Sequence
  Description of Artificial Sequence: Synthetic whey; 5' sequence and inner sequence
tagggaagagaaggacatatgatcgtgtgcgcaacgtgacacggtccttcgca

SEQ ID NO: 45880 - DNA, 53 bp, Artificial Sequence
  Description of Artificial Sequence: Synthetic whey; 5' sequence and inner sequence
tagggaagagaaggacatatgatccatcgcgtcactataatgtgtgtcacgta

SEQ ID NO: 45881 - DNA, 53 bp, Artificial Sequence
  Description of Artificial Sequence: Synthetic whey; 5' sequence and inner sequence
tagggaagagaaggacatatgatcgtgtacgacgcgacaacgtgcctgccgtg

SEQ ID NO: 45882 - DNA, 53 bp, Artificial Sequence; identical to SEQ ID NO: 1085
  Description of Artificial Sequence: Synthetic whey; 5' sequence and inner sequence

SEQ ID NO: 45883 - DNA, 53 bp, Artificial Sequence
  Description of Artificial Sequence: Synthetic whey; 5' sequence and inner sequence
tagggaagagaaggacatatgatacgtcacacgcacaggtacgttgtggtacg

SEQ ID NO: 45884 - DNA, 53 bp, Artificial Sequence
  Description of Artificial Sequence: Synthetic whey; 5' sequence and inner sequence
tagggaagagaaggacatatgatacgtcacaacgcagcgtccgttcgtacggt

SEQ ID NO: 45885 - DNA, 53 bp, Artificial Sequence
  Description of Artificial Sequence: Synthetic whey; 5' sequence and inner sequence
tagggaagagaaggacatatgatgtcactctgcctgaccgtcaagttgcggca

SEQ ID NO: 45886 - DNA, 53 bp, Artificial Sequence
  Description of Artificial Sequence: Synthetic whey; 5' sequence and inner sequence
tagggaagagaaggacatatgattgtgcacacaccgtatgtcctcacgtcacg

SEQ ID NO: 45887 - DNA, 53 bp, Artificial Sequence; identical to SEQ ID NO: 29557
  Description of Artificial Sequence: Synthetic whey; 5' sequence and inner sequence

SEQ ID NO: 45888 - DNA, 53 bp, Artificial Sequence
  Description of Artificial Sequence: Synthetic whey; 5' sequence and inner sequence
tagggaagagaaggacatatgatcgtgcgacagtacgacgagatgtgcgtgtc

SEQ ID NO: 45889 - DNA, 53 bp, Artificial Sequence
  Description of Artificial Sequence: Synthetic whey; 5' sequence and inner sequence
tagggaagagaaggacatatgatgcgatgtcgcaacgatgtacggtctgcacg

SEQ ID NO: 45890 - DNA, 53 bp, Artificial Sequence
  Description of Artificial Sequence: Synthetic whey; 5' sequence and inner sequence
tagggaagagaaggacatatgatacgtcacaacgcgtgtcgtccgttcgcgcc

SEQ ID NO: 45891 - DNA, 53 bp, Artificial Sequence
  Description of Artificial Sequence: Synthetic whey; 5' sequence and inner sequence
tagggaagagaaggacatatgatcgatcacgatgcgaacacatggcctgcagc

SEQ ID NO: 45892 - DNA, 53 bp, Artificial Sequence; identical to SEQ ID NO: 29595
  Description of Artificial Sequence: Synthetic whey; 5' sequence and inner sequence

SEQ ID NO: 45893 - DNA, 53 bp, Artificial Sequence; identical to SEQ ID NO: 1317
  Description of Artificial Sequence: Synthetic whey; 5' sequence and inner sequence

SEQ ID NO: 45894 - DNA, 53 bp, Artificial Sequence
  Description of Artificial Sequence: Synthetic whey; 5' sequence and inner sequence
tagggaagagaaggacatatgatggacgcaacgtaccgaatcgtggccatgtg

SEQ ID NO: 45895 - DNA, 53 bp, Artificial Sequence
  Description of Artificial Sequence: Synthetic whey; 5' sequence and inner sequence
tagggaagagaaggacatatgatgtcactgtgcccgaccgtcaagttgcggca

SEQ ID NO: 45896 - DNA, 53 bp, Artificial Sequence; identical to SEQ ID NO: 33136
  Description of Artificial Sequence: Synthetic whey; 5' sequence and inner sequence

SEQ ID NO: 45897 - DNA, 53 bp, Artificial Sequence; identical to SEQ ID NO: 1179
  Description of Artificial Sequence: Synthetic whey; 5' sequence and inner sequence

SEQ ID NO: 45898 - DNA, 53 bp, Artificial Sequence
  Description of Artificial Sequence: Synthetic whey; 5' sequence and inner sequence
tagggaagagaaggacatatgatgcgttggcgacgagtgcgtgacgttacgcg

SEQ ID NO: 45899 - DNA, 53 bp, Artificial Sequence; identical to SEQ ID NO: 21736
  Description of Artificial Sequence: Synthetic whey; 5' sequence and inner sequence

SEQ ID NO: 45900 - DNA, 53 bp, Artificial Sequence
  Description of Artificial Sequence: Synthetic whey; 5' sequence and inner sequence
tagggaagagaaggacatatgatgcgtggcgtaacgcagcgtgtggcatcgcg

SEQ ID NO: 45901 - DNA, 53 bp, Artificial Sequence
  Description of Artificial Sequence: Synthetic whey; 5' sequence and inner sequence
tagggaagagaaggacatatgattgtgcgaaacggaccgcatgttacgtcaca

SEQ ID NO: 45902 - DNA, 53 bp, Artificial Sequence
  Description of Artificial Sequence: Synthetic whey; 5' sequence and inner sequence
tagggaagagaaggacatatgatcgtgatgcgtcacgtcacattcggcctgtc

SEQ ID NO: 45903 - DNA, 53 bp, Artificial Sequence
  Description of Artificial Sequence: Synthetic whey; 5' sequence and inner sequence
tagggaagagaaggacatatgatggacgcaacttaccgtatcgtggccatgtg

SEQ ID NO: 45904 - DNA, 53 bp, Artificial Sequence; identical to SEQ ID NO: 21553
  Description of Artificial Sequence: Synthetic whey; 5' sequence and inner sequence

SEQ ID NO: 45905 - DNA, 53 bp, Artificial Sequence
  Description of Artificial Sequence: Synthetic whey; 5' sequence and inner sequence
tagggaagagaaggacatatgatgtcactgtgcctgaccgtcaagttgccgca

SEQ ID NO: 45906 - DNA, 53 bp, Artificial Sequence; identical to SEQ ID NO: 1603
  Description of Artificial Sequence: Synthetic whey; 5' sequence and inner sequence

SEQ ID NO: 45907 - DNA, 53 bp, Artificial Sequence
  Description of Artificial Sequence: Synthetic whey; 5' sequence and inner sequence
tagggaagagaaggacatatgatgcacgaatcgcaccctatcatgtaggcatg

SEQ ID NO: 45908 - DNA, 53 bp, Artificial Sequence
  Description of Artificial Sequence: Synthetic whey; 5' sequence and inner sequence
tagggaagagaaggacatatgatacgcaacgacgctacgatacgtgctgtacg

SEQ ID NO: 45909 - DNA, 53 bp, Artificial Sequence; identical to SEQ ID NO: 1497
  Description of Artificial Sequence: Synthetic whey; 5' sequence and inner sequence

SEQ ID NO: 45910 - DNA, 53 bp, Artificial Sequence
  Description of Artificial Sequence: Synthetic whey; 5' sequence and inner sequence
tagggaagagaaggacatatgatcgtcacgccgaggcacgtccttccgccacg

SEQ ID NO: 45911 - DNA, 53 bp, Artificial Sequence; identical to SEQ ID NO: 1905
  Description of Artificial Sequence: Synthetic whey; 5' sequence and inner sequence

SEQ ID NO: 45912 - DNA, 53 bp, Artificial Sequence; identical to SEQ ID NO: 1956
  Description of Artificial Sequence: Synthetic whey; 5' sequence and inner sequence

SEQ ID NO: 45913 - DNA, 53 bp, Artificial Sequence; identical to SEQ ID NO: 29555
  Description of Artificial Sequence: Synthetic whey; 5' sequence and inner sequence

SEQ ID NO: 45914 - DNA, 53 bp, Artificial Sequence; identical to SEQ ID NO: 5807
  Description of Artificial Sequence: Synthetic whey; 5' sequence and inner sequence

SEQ ID NO: 45915 - DNA, 53 bp, Artificial Sequence; identical to SEQ ID NO: 21343
  Description of Artificial Sequence: Synthetic whey; 5' sequence and inner sequence

SEQ ID NO: 45916 - DNA, 53 bp, Artificial Sequence
  Description of Artificial Sequence: Synthetic whey; 5' sequence and inner sequence
tagggaagagaaggacatatgatgtcactgtgcctgaccgtcaagttgcggcc

SEQ ID NO: 45917 - DNA, 53 bp, Artificial Sequence
  Description of Artificial Sequence: Synthetic whey; 5' sequence and inner sequence
tagggaagagaaggacatatgatggacgcaacgtaccgtatcgttgccatgtg

SEQ ID NO: 45918 - DNA, 53 bp, Artificial Sequence
  Description of Artificial Sequence: Synthetic whey; 5' sequence and inner sequence
tagggaagagaaggacatatgatgtcactgggcctgaccgtcaagttgcggca

SEQ ID NO: 45919 - DNA, 53 bp, Artificial Sequence; identical to SEQ ID NO: 29910
  Description of Artificial Sequence: Synthetic whey; 5' sequence and inner sequence

SEQ ID NO: 45920 - DNA, 53 bp, Artificial Sequence
  Description of Artificial Sequence: Synthetic whey; 5' sequence and inner sequence
tagggaagagaaggacatatgatttacgcatcgtcccgtcatgtggttccgta

SEQ ID NO: 45921 - DNA, 53 bp, Artificial Sequence; identical to SEQ ID NO: 21367
  Description of Artificial Sequence: Synthetic whey; 5' sequence and inner sequence

SEQ ID NO: 45922 - DNA, 53 bp, Artificial Sequence
  Description of Artificial Sequence: Synthetic whey; 5' sequence and inner sequence
tagggaagagaaggacatatgatgtcatgccatccctccgagtgtgacaggta

SEQ ID NO: 45923 - DNA, 53 bp, Artificial Sequence
  Description of Artificial Sequence: Synthetic whey; 5' sequence and inner sequence
tagggaagagaaggacatatgatcgtacgcaacgtgcacgactgtcctgtgcc

SEQ ID NO: 45924 - DNA, 53 bp, Artificial Sequence
  Description of Artificial Sequence: Synthetic whey; 5' sequence and inner sequence
tagggaagagaaggacatatgatgcacgactcgcaccctctcatgtaggcatg

SEQ ID NO: 45925 - DNA, 53 bp, Artificial Sequence; identical to SEQ ID NO: 21388
  Description of Artificial Sequence: Synthetic whey; 5' sequence and inner sequence

SEQ ID NO: 45926 - DNA, 53 bp, Artificial Sequence
  Description of Artificial Sequence: Synthetic whey; 5' sequence and inner sequence
tagggaagagaaggacatatgatgcactgcacgcaccctctcatgtaggcatg

SEQ ID NO: 45927 - DNA, 53 bp, Artificial Sequence; identical to SEQ ID NO: 13827
  Description of Artificial Sequence: Synthetic whey; 5' sequence and inner sequence

SEQ ID NO: 45928 - DNA, 53 bp, Artificial Sequence; identical to SEQ ID NO: 17878
  Description of Artificial Sequence: Synthetic whey; 5' sequence and inner sequence

SEQ ID NO: 45929 - DNA, 53 bp, Artificial Sequence; identical to SEQ ID NO: 1245
  Description of Artificial Sequence: Synthetic whey; 5' sequence and inner sequence

SEQ ID NO: 45930 - DNA, 53 bp, Artificial Sequence; identical to SEQ ID NO: 13767
  Description of Artificial Sequence: Synthetic whey; 5' sequence and inner sequence

SEQ ID NO: 45931 - DNA, 53 bp, Artificial Sequence
  Description of Artificial Sequence: Synthetic whey; 5' sequence and inner sequence
tagggaagagaaggacatatgatcgatgcgcagtcaggcataggtacgacaca

SEQ ID NO: 45932 - DNA, 53 bp, Artificial Sequence
  Description of Artificial Sequence: Synthetic whey; 5' sequence and inner sequence
tagggaagagaaggacatatgatcgtgcgcagaacgtgactgtcgtgcttggc

SEQ ID NO: 45933 - DNA, 53 bp, Artificial Sequence; identical to SEQ ID NO: 1840
  Description of Artificial Sequence: Synthetic whey; 5' sequence and inner sequence

SEQ ID NO: 45934 - DNA, 53 bp, Artificial Sequence
  Description of Artificial Sequence: Synthetic whey; 5' sequence and inner sequence
tagggaagagaaggacatatgatccatcgcgtcactatcatgtgtgtcactta

SEQ ID NO: 45935 - DNA, 53 bp, Artificial Sequence
  Description of Artificial Sequence: Synthetic whey; 5' sequence and inner sequence
tagggaagagaaggacatatgatggacgcagcgtaccgttcgagtggtacgta

SEQ ID NO: 45936 - DNA, 53 bp, Artificial Sequence
  Description of Artificial Sequence: Synthetic whey; 5' sequence and inner sequence
tagggaagagaaggacatatgatacgtcacgatgcataacgtccttgtgcgca

SEQ ID NO: 45937 - DNA, 53 bp, Artificial Sequence
  Description of Artificial Sequence: Synthetic whey; 5' sequence and inner sequence
tagggaagagaaggacatatgatggacgcaacgtaccgtatcatgaggccatg

SEQ ID NO: 45938 - DNA, 53 bp, Artificial Sequence
  Description of Artificial Sequence: Synthetic whey; 5' sequence and inner sequence
tagggaagagaaggacatatgatgtcactttgcctgaccgtcaagttgcggca

SEQ ID NO: 45939 - DNA, 53 bp, Artificial Sequence
  Description of Artificial Sequence: Synthetic whey; 5' sequence and inner sequence
tagggaagagaaggacatatgatggacgcaacgtaccgtatcgtgaccatgtg

SEQ ID NO: 45940 - DNA, 53 bp, Artificial Sequence; identical to SEQ ID NO: 29195
  Description of Artificial Sequence: Synthetic whey; 5' sequence and inner sequence

SEQ ID NO: 45941 - DNA, 53 bp, Artificial Sequence
  Description of Artificial Sequence: Synthetic whey; 5' sequence and inner sequence
tagggaagagaaggacatatgatcgatgcacgatgcgacactgtcacgttgcg

SEQ ID NO: 45942 - DNA, 53 bp, Artificial Sequence
  Description of Artificial Sequence: Synthetic whey; 5' sequence and inner sequence
tagggaagagaaggacatatgatccatcgcgtcactatcatgtgtgtcatgta

SEQ ID NO: 45943 - DNA, 53 bp, Artificial Sequence; identical to SEQ ID NO: 29818
  Description of Artificial Sequence: Synthetic whey; 5' sequence and inner sequence

SEQ ID NO: 45944 - DNA, 53 bp, Artificial Sequence; identical to SEQ ID NO: 21962
  Description of Artificial Sequence: Synthetic whey; 5' sequence and inner sequence

SEQ ID NO: 45945 - DNA, 53 bp, Artificial Sequence
  Description of Artificial Sequence: Synthetic whey; 5' sequence and inner sequence
tagggaagagaaggacatatgatggccacagcgtacctcaacgtggacgtgaa

SEQ ID NO: 45946 - DNA, 53 bp, Artificial Sequence; identical to SEQ ID NO: 1159
  Description of Artificial Sequence: Synthetic whey; 5' sequence and inner sequence

SEQ ID NO: 45947 - DNA, 53 bp, Artificial Sequence
  Description of Artificial Sequence: Synthetic whey; 5' sequence and inner sequence
tagggaagagaaggacatatgatggacgcaacgtaacgtatcgtggccatgta

SEQ ID NO: 45948 - DNA, 53 bp, Artificial Sequence; identical to SEQ ID NO: 17692
  Description of Artificial Sequence: Synthetic whey; 5' sequence and inner sequence

SEQ ID NO: 45949 - DNA, 53 bp, Artificial Sequence
  Description of Artificial Sequence: Synthetic whey; 5' sequence and inner sequence
tagggaagagaaggacatatgatccatcgcgtcactgtcatgtgtgtcacgta

SEQ ID NO: 45950 - DNA, 48 bp, Artificial Sequence; identical to SEQ ID NO: 21136
  Description of Artificial Sequence: Synthetic whey; 5' sequence and inner sequence

SEQ ID NO: 45951 - DNA, 53 bp, Artificial Sequence
  Description of Artificial Sequence: Synthetic whey; 5' sequence and inner sequence
tagggaagagaaggacatatgatcgtacgcatcgagctgcacgtgtcgtcacg

SEQ ID NO: 45952 - DNA, 53 bp, Artificial Sequence
  Description of Artificial Sequence: Synthetic whey; 5' sequence and inner sequence
tagggaagagaaggacatatgatacgtcacaacctcacgttggctagcgcggt

SEQ ID NO: 45953 - DNA, 53 bp, Artificial Sequence
  Description of Artificial Sequence: Synthetic whey; 5' sequence and inner sequence
tagggaagagaaggacatatgatcatgtacgcactgtcaccttgcacgtcacg

SEQ ID NO: 45954 - DNA, 53 bp, Artificial Sequence; identical to SEQ ID NO: 21534
  Description of Artificial Sequence: Synthetic whey; 5' sequence and inner sequence

SEQ ID NO: 45955 - DNA, 53 bp, Artificial Sequence; identical to SEQ ID NO: 1569
  Description of Artificial Sequence: Synthetic whey; 5' sequence and inner sequence

SEQ ID NO: 45956 - DNA, 53 bp, Artificial Sequence
  Description of Artificial Sequence: Synthetic whey; 5' sequence and inner sequence
tagggaagagaaggacatatgatgtcatgccattccttcgagtgtgacaggta

SEQ ID NO: 45957 - DNA, 53 bp, Artificial Sequence; identical to SEQ ID NO: 21807
  Description of Artificial Sequence: Synthetic whey; 5' sequence and inner sequence

SEQ ID NO: 45958 - DNA, 53 bp, Artificial Sequence
  Description of Artificial Sequence: Synthetic whey; 5' sequence and inner sequence
tagggaagagaaggacatatgattgtgacgcacaggaggacgtacgctgcacg

SEQ ID NO: 45959 - DNA, 53 bp, Artificial Sequence; identical to SEQ ID NO: 13936
  Description of Artificial Sequence: Synthetic whey; 5' sequence and inner sequence

SEQ ID NO: 45960 - DNA, 53 bp, Artificial Sequence; identical to SEQ ID NO: 33802
  Description of Artificial Sequence: Synthetic whey; 5' sequence and inner sequence

SEQ ID NO: 45961 - DNA, 53 bp, Artificial Sequence
  Description of Artificial Sequence: Synthetic whey; 5' sequence and inner sequence
tagggaagagaaggacatatgatggccacagcgtacctcaacgtggacgcgta

SEQ ID NO: 45962 - DNA, 53 bp, Artificial Sequence; identical to SEQ ID NO: 17408
  Description of Artificial Sequence: Synthetic whey; 5' sequence and inner sequence

SEQ ID NO: 45963 - DNA, 53 bp, Artificial Sequence
  Description of Artificial Sequence: Synthetic whey; 5' sequence and inner sequence
tagggaagagaaggacatatgatgtacgcatcgtcccgtcatgtggttccgtc

SEQ ID NO: 45964 - DNA, 53 bp, Artificial Sequence; identical to SEQ ID NO: 1147
  Description of Artificial Sequence: Synthetic whey; 5' sequence and inner sequence

SEQ ID NO: 45965 - DNA, 53 bp, Artificial Sequence; identical to SEQ ID NO: 9769
  Description of Artificial Sequence: Synthetic whey; 5' sequence and inner sequence

SEQ ID NO: 45966 - DNA, 53 bp, Artificial Sequence
  Description of Artificial Sequence: Synthetic whey; 5' sequence and inner sequence
tagggaagagaaggacatatgatcacgtcaggcagatggacgcatacgacacg

SEQ ID NO: 45967 - DNA, 53 bp, Artificial Sequence
  Description of Artificial Sequence: Synthetic whey; 5' sequence and inner sequence
tagggaagagaaggacatatgatgcacgactcgcacactatcatgtaggcatg

SEQ ID NO: 45968 - DNA, 53 bp, Artificial Sequence; identical to SEQ ID NO: 17803
  Description of Artificial Sequence: Synthetic whey; 5' sequence and inner sequence

SEQ ID NO: 45969 - DNA, 53 bp, Artificial Sequence; identical to SEQ ID NO: 1101
  Description of Artificial Sequence: Synthetic whey; 5' sequence and inner sequence

SEQ ID NO: 45970 - DNA, 53 bp, Artificial Sequence
  Description of Artificial Sequence: Synthetic whey; 5' sequence and inner sequence
tagggaagagaaggacatatgatgtacgcatcgtccagtcatgtggttccgta

SEQ ID NO: 45971 - DNA, 53 bp, Artificial Sequence
  Description of Artificial Sequence: Synthetic whey; 5' sequence and inner sequence
tagggaagagaaggacatatgatgcacgactcgcaccctgtcatgaggccatg

SEQ ID NO: 45972 - DNA, 53 bp, Artificial Sequence
  Description of Artificial Sequence: Synthetic whey; 5' sequence and inner sequence
tagggaagagaaggacatatgatgcgtcacacagcagcgtgttacgtcctgcc

SEQ ID NO: 45973 - DNA, 53 bp, Artificial Sequence; identical to SEQ ID NO: 33484
  Description of Artificial Sequence: Synthetic whey; 5' sequence and inner sequence

SEQ ID NO: 45974 - DNA, 53 bp, Artificial Sequence; identical to SEQ ID NO: 1091
  Description of Artificial Sequence: Synthetic whey; 5' sequence and inner sequence

SEQ ID NO: 45975 - DNA, 53 bp, Artificial Sequence
  Description of Artificial Sequence: Synthetic whey; 5' sequence and inner sequence
tagggaagagaaggacatatgatgtcattccgcatcccacacgtgggcacgta

SEQ ID NO: 45976 - DNA, 53 bp, Artificial Sequence; identical to SEQ ID NO: 29744
  Description of Artificial Sequence: Synthetic whey; 5' sequence and inner sequence

SEQ ID NO: 45977 - DNA, 53 bp, Artificial Sequence
  Description of Artificial Sequence: Synthetic whey; 5' sequence and inner sequence
tagggaagagaaggacatatgatcgtggcacgtcacgcatgatgcacttcggt

SEQ ID NO: 45978 - DNA, 53 bp, Artificial Sequence
  Description of Artificial Sequence: Synthetic whey; 5' sequence and inner sequence
tagggaagagaaggacatatgatcgtgatggcgaacgtgtactgcgacatgcc

SEQ ID NO: 45979 - DNA, 53 bp, Artificial Sequence
  Description of Artificial Sequence: Synthetic whey; 5' sequence and inner sequence
tagggaagagaaggacatatgatgtcacgccatcccttcgagtgtgacaggta

SEQ ID NO: 45980 - DNA, 53 bp, Artificial Sequence; identical to SEQ ID NO: 1653
  Description of Artificial Sequence: Synthetic whey; 5' sequence and inner sequence

SEQ ID NO: 45981 - DNA, 53 bp, Artificial Sequence
  Description of Artificial Sequence: Synthetic whey; 5' sequence and inner sequence
tagggaagagaaggacatatgatgtcatgcaatcccttcgagtgtgacaggta

SEQ ID NO: 45982 - DNA, 53 bp, Artificial Sequence
  Description of Artificial Sequence: Synthetic whey; 5' sequence and inner sequence
tagggaagagaaggacatatgatgtcatcccatcccttcgagtgtgacaggta

SEQ ID NO: 45983 - DNA, 53 bp, Artificial Sequence
  Description of Artificial Sequence: Synthetic whey; 5' sequence and inner sequence
tagggaagagaaggacatatgatgcacgcaacgtaccgtatcgtggccatgtg

SEQ ID NO: 45984 - DNA, 53 bp, Artificial Sequence; identical to SEQ ID NO: 1448
  Description of Artificial Sequence: Synthetic whey; 5' sequence and inner sequence

SEQ ID NO: 45985 - DNA, 53 bp, Artificial Sequence
  Description of Artificial Sequence: Synthetic whey; 5' sequence and inner sequence
tagggaagagaaggacatatgatggacgcaacgtaccgtcatgtggttccgta

SEQ ID NO: 45986 - DNA, 53 bp, Artificial Sequence; identical to SEQ ID NO: 21574
  Description of Artificial Sequence: Synthetic whey; 5' sequence and inner sequence

SEQ ID NO: 45987 - DNA, 53 bp, Artificial Sequence; identical to SEQ ID NO: 17695
  Description of Artificial Sequence: Synthetic whey; 5' sequence and inner sequence

SEQ ID NO: 45988 - DNA, 53 bp, Artificial Sequence; identical to SEQ ID NO: 1102
  Description of Artificial Sequence: Synthetic whey; 5' sequence and inner sequence

SEQ ID NO: 45989 - DNA, 53 bp, Artificial Sequence
  Description of Artificial Sequence: Synthetic whey; 5' sequence and inner sequence
tagggaagagaaggacatatgatcgtgcaacgcgagctgcgacgtacgacacg

SEQ ID NO: 45990 - DNA, 53 bp, Artificial Sequence; identical to SEQ ID NO: 1788
  Description of Artificial Sequence: Synthetic whey; 5' sequence and inner sequence

SEQ ID NO: 45991 - DNA, 53 bp, Artificial Sequence
  Description of Artificial Sequence: Synthetic whey; 5' sequence and inner sequence
tagggaagagaaggacatatgatggacgcaacgtaccgtatcgtggctatgtg

SEQ ID NO: 45992 - DNA, 53 bp, Artificial Sequence
  Description of Artificial Sequence: Synthetic whey; 5' sequence and inner sequence
tagggaagagaaggacatatgatgtcactgtgcctgaccatcaagttgcggca

SEQ ID NO: 45993 - DNA, 53 bp, Artificial Sequence
  Description of Artificial Sequence: Synthetic whey; 5' sequence and inner sequence
tagggaagagaaggacatatgatgcaacgcgaggacgtactgctgcctacacg

SEQ ID NO: 45994 - DNA, 53 bp, Artificial Sequence
  Description of Artificial Sequence: Synthetic whey; 5' sequence and inner sequence
tagggaagagaaggacatatgatgcgctaggcgtgacgtacacatgctgcacg

SEQ ID NO: 45995 - DNA, 53 bp, Artificial Sequence; identical to SEQ ID NO: 9763
  Description of Artificial Sequence: Synthetic whey; 5' sequence and inner sequence

SEQ ID NO: 45996 - DNA, 53 bp, Artificial Sequence
  Description of Artificial Sequence: Synthetic whey; 5' sequence and inner sequence
tagggaagagaaggacatatgatcacgtacagtgaggcgtacctgcatgcgca

SEQ ID NO: 45997 - DNA, 53 bp, Artificial Sequence
  Description of Artificial Sequence: Synthetic whey; 5' sequence and inner sequence
tagggaagagaaggacatatgatcgacatgagcacggtatgcctcactgcacg

SEQ ID NO: 45998 - DNA, 53 bp, Artificial Sequence
  Description of Artificial Sequence: Synthetic whey; 5' sequence and inner sequence
tagggaagagaaggacatatgatcgtgcacgaggacgacgaacgcactacgca

SEQ ID NO: 45999 - DNA, 53 bp, Artificial Sequence
  Description of Artificial Sequence: Synthetic whey; 5' sequence and inner sequence
tagggaagagaaggacatatgatagccacagcgtacctcaacgtggacgtgca

SEQ ID NO: 46000 - DNA, 53 bp, Artificial Sequence
  Description of Artificial Sequence: Synthetic whey; 5' sequence and inner sequence
tagggaagagaaggacatatgattcgacggcaaggtgaggcacgtgcatcgcg

SEQ ID NO: 46001 - DNA, 53 bp, Artificial Sequence
  Description of Artificial Sequence: Synthetic whey; 5' sequence and inner sequence
tagggaagagaaggacatatgatggactcaacgtaccgtatcgtggccatgta

SEQ ID NO: 46002 - DNA, 53 bp, Artificial Sequence; identical to SEQ ID NO: 33341
  Description of Artificial Sequence: Synthetic whey; 5' sequence and inner sequence

SEQ ID NO: 46003 - DNA, 53 bp, Artificial Sequence; identical to SEQ ID NO: 2004
  Description of Artificial Sequence: Synthetic whey; inner sequence and 3'  sequence

SEQ ID NO: 46004 - DNA, 53 bp, Artificial Sequence; identical to SEQ ID NO: 2021
  Description of Artificial Sequence: Synthetic whey; inner sequence and 3'  sequence

SEQ ID NO: 46005 - DNA, 53 bp, Artificial Sequence; identical to SEQ ID NO: 2009
  Description of Artificial Sequence: Synthetic whey; inner sequence and 3'  sequence

SEQ ID NO: 46006 - DNA, 53 bp, Artificial Sequence; identical to SEQ ID NO: 2008
  Description of Artificial Sequence: Synthetic whey; inner sequence and 3'  sequence

SEQ ID NO: 46007 - DNA, 53 bp, Artificial Sequence; identical to SEQ ID NO: 2006
  Description of Artificial Sequence: Synthetic whey; inner sequence and 3'  sequence

SEQ ID NO: 46008 - DNA, 53 bp, Artificial Sequence; identical to SEQ ID NO: 2020
  Description of Artificial Sequence: Synthetic whey; inner sequence and 3'  sequence

SEQ ID NO: 46009 - DNA, 53 bp, Artificial Sequence; identical to SEQ ID NO: 2011
  Description of Artificial Sequence: Synthetic whey; inner sequence and 3'  sequence

SEQ ID NO: 46010 - DNA, 53 bp, Artificial Sequence; identical to SEQ ID NO: 2003
  Description of Artificial Sequence: Synthetic whey; inner sequence and 3'  sequence

SEQ ID NO: 46011 - DNA, 53 bp, Artificial Sequence; identical to SEQ ID NO: 2007
  Description of Artificial Sequence: Synthetic whey; inner sequence and 3'  sequence

SEQ ID NO: 46012 - DNA, 53 bp, Artificial Sequence; identical to SEQ ID NO: 2052
  Description of Artificial Sequence: Synthetic whey; inner sequence and 3'  sequence

SEQ ID NO: 46013 - DNA, 53 bp, Artificial Sequence; identical to SEQ ID NO: 2005
  Description of Artificial Sequence: Synthetic whey; inner sequence and 3'  sequence

SEQ ID NO: 46014 - DNA, 53 bp, Artificial Sequence; identical to SEQ ID NO: 2028
  Description of Artificial Sequence: Synthetic whey; inner sequence and 3'  sequence

SEQ ID NO: 46015 - DNA, 53 bp, Artificial Sequence; identical to SEQ ID NO: 2010
  Description of Artificial Sequence: Synthetic whey; inner sequence and 3'  sequence

SEQ ID NO: 46016 - DNA, 53 bp, Artificial Sequence; identical to SEQ ID NO: 2014
  Description of Artificial Sequence: Synthetic whey; inner sequence and 3'  sequence

SEQ ID NO: 46017 - DNA, 53 bp, Artificial Sequence; identical to SEQ ID NO: 2081
  Description of Artificial Sequence: Synthetic whey; inner sequence and 3'  sequence

SEQ ID NO: 46018 - DNA, 53 bp, Artificial Sequence; identical to SEQ ID NO: 2201
  Description of Artificial Sequence: Synthetic whey; inner sequence and 3'  sequence

SEQ ID NO: 46019 - DNA, 53 bp, Artificial Sequence; identical to SEQ ID NO: 2033
  Description of Artificial Sequence: Synthetic whey; inner sequence and 3'  sequence

SEQ ID NO: 46020 - DNA, 53 bp, Artificial Sequence; identical to SEQ ID NO: 2040
  Description of Artificial Sequence: Synthetic whey; inner sequence and 3'  sequence

SEQ ID NO: 46021 - DNA, 53 bp, Artificial Sequence; identical to SEQ ID NO: 2220
  Description of Artificial Sequence: Synthetic whey; inner sequence and 3'  sequence

SEQ ID NO: 46022 - DNA, 51 bp, Artificial Sequence; identical to SEQ ID NO: 2241
  Description of Artificial Sequence: Synthetic whey; inner sequence and 3'  sequence

SEQ ID NO: 46023 - DNA, 53 bp, Artificial Sequence; identical to SEQ ID NO: 2458
  Description of Artificial Sequence: Synthetic whey; inner sequence and 3'  sequence

SEQ ID NO: 46024 - DNA, 53 bp, Artificial Sequence; identical to SEQ ID NO: 18640
  Description of Artificial Sequence: Synthetic whey; inner sequence and 3'  sequence

SEQ ID NO: 46025 - DNA, 53 bp, Artificial Sequence; identical to SEQ ID NO: 2030
  Description of Artificial Sequence: Synthetic whey; inner sequence and 3'  sequence

SEQ ID NO: 46026 - DNA, 53 bp, Artificial Sequence; identical to SEQ ID NO: 2046
  Description of Artificial Sequence: Synthetic whey; inner sequence and 3'  sequence

SEQ ID NO: 46027 - DNA, 53 bp, Artificial Sequence; identical to SEQ ID NO: 2012
  Description of Artificial Sequence: Synthetic whey; inner sequence and 3'  sequence

SEQ ID NO: 46028 - DNA, 53 bp, Artificial Sequence; identical to SEQ ID NO: 2036
  Description of Artificial Sequence: Synthetic whey; inner sequence and 3'  sequence

SEQ ID NO: 46029 - DNA, 53 bp, Artificial Sequence; identical to SEQ ID NO: 2078
  Description of Artificial Sequence: Synthetic whey; inner sequence and 3'  sequence

SEQ ID NO: 46030 - DNA, 53 bp, Artificial Sequence; identical to SEQ ID NO: 2279
  Description of Artificial Sequence: Synthetic whey; inner sequence and 3'  sequence

SEQ ID NO: 46031 - DNA, 53 bp, Artificial Sequence; identical to SEQ ID NO: 2491
  Description of Artificial Sequence: Synthetic whey; inner sequence and 3'  sequence

SEQ ID NO: 46032 - DNA, 53 bp, Artificial Sequence; identical to SEQ ID NO: 2108
  Description of Artificial Sequence: Synthetic whey; inner sequence and 3'  sequence

SEQ ID NO: 46033 - DNA, 53 bp, Artificial Sequence; identical to SEQ ID NO: 22468
  Description of Artificial Sequence: Synthetic whey; inner sequence and 3'  sequence

SEQ ID NO: 46034 - DNA, 53 bp, Artificial Sequence; identical to SEQ ID NO: 2115
  Description of Artificial Sequence: Synthetic whey; inner sequence and 3'  sequence

SEQ ID NO: 46035 - DNA, 53 bp, Artificial Sequence; identical to SEQ ID NO: 22466
  Description of Artificial Sequence: Synthetic whey; inner sequence and 3'  sequence

SEQ ID NO: 46036 - DNA, 53 bp, Artificial Sequence; identical to SEQ ID NO: 2063
  Description of Artificial Sequence: Synthetic whey; inner sequence and 3'  sequence

SEQ ID NO: 46037 - DNA, 53 bp, Artificial Sequence; identical to SEQ ID NO: 2526
  Description of Artificial Sequence: Synthetic whey; inner sequence and 3'  sequence

SEQ ID NO: 46038 - DNA, 53 bp, Artificial Sequence; identical to SEQ ID NO: 2015
  Description of Artificial Sequence: Synthetic whey; inner sequence and 3'  sequence

SEQ ID NO: 46039 - DNA, 53 bp, Artificial Sequence; identical to SEQ ID NO: 18266
  Description of Artificial Sequence: Synthetic whey; inner sequence and 3'  sequence

SEQ ID NO: 46040 - DNA, 53 bp, Artificial Sequence; identical to SEQ ID NO: 2023
  Description of Artificial Sequence: Synthetic whey; inner sequence and 3'  sequence

SEQ ID NO: 46041 - DNA, 53 bp, Artificial Sequence; identical to SEQ ID NO: 2323
  Description of Artificial Sequence: Synthetic whey; inner sequence and 3'  sequence

SEQ ID NO: 46042 - DNA, 53 bp, Artificial Sequence; identical to SEQ ID NO: 2071
  Description of Artificial Sequence: Synthetic whey; inner sequence and 3'  sequence

SEQ ID NO: 46043 - DNA, 53 bp, Artificial Sequence; identical to SEQ ID NO: 2018
  Description of Artificial Sequence: Synthetic whey; inner sequence and 3'  sequence

SEQ ID NO: 46044 - DNA, 53 bp, Artificial Sequence; identical to SEQ ID NO: 2506
  Description of Artificial Sequence: Synthetic whey; inner sequence and 3'  sequence

SEQ ID NO: 46045 - DNA, 53 bp, Artificial Sequence; identical to SEQ ID NO: 2340
  Description of Artificial Sequence: Synthetic whey; inner sequence and 3'  sequence

SEQ ID NO: 46046 - DNA, 53 bp, Artificial Sequence; identical to SEQ ID NO: 2145
  Description of Artificial Sequence: Synthetic whey; inner sequence and 3'  sequence

SEQ ID NO: 46047 - DNA, 53 bp, Artificial Sequence; identical to SEQ ID NO: 30208
  Description of Artificial Sequence: Synthetic whey; inner sequence and 3'  sequence

SEQ ID NO: 46048 - DNA, 53 bp, Artificial Sequence; identical to SEQ ID NO: 2066
  Description of Artificial Sequence: Synthetic whey; inner sequence and 3'  sequence

SEQ ID NO: 46049 - DNA, 53 bp, Artificial Sequence; identical to SEQ ID NO: 2110
  Description of Artificial Sequence: Synthetic whey; inner sequence and 3'  sequence

SEQ ID NO: 46050 - DNA, 53 bp, Artificial Sequence; identical to SEQ ID NO: 2131
  Description of Artificial Sequence: Synthetic whey; inner sequence and 3'  sequence

SEQ ID NO: 46051 - DNA, 53 bp, Artificial Sequence; identical to SEQ ID NO: 2035
  Description of Artificial Sequence: Synthetic whey; inner sequence and 3'  sequence

SEQ ID NO: 46052 - DNA, 53 bp, Artificial Sequence; identical to SEQ ID NO: 2045
  Description of Artificial Sequence: Synthetic whey; inner sequence and 3'  sequence

SEQ ID NO: 46053 - DNA, 53 bp, Artificial Sequence; identical to SEQ ID NO: 18819
  Description of Artificial Sequence: Synthetic whey; inner sequence and 3'  sequence

SEQ ID NO: 46054 - DNA, 53 bp, Artificial Sequence; identical to SEQ ID NO: 2369
  Description of Artificial Sequence: Synthetic whey; inner sequence and 3'  sequence

SEQ ID NO: 46055 - DNA, 53 bp, Artificial Sequence; identical to SEQ ID NO: 2022
  Description of Artificial Sequence: Synthetic whey; inner sequence and 3'  sequence

SEQ ID NO: 46056 - DNA, 53 bp, Artificial Sequence; identical to SEQ ID NO: 30199
  Description of Artificial Sequence: Synthetic whey; inner sequence and 3'  sequence

SEQ ID NO: 46057 - DNA, 53 bp, Artificial Sequence; identical to SEQ ID NO: 2121
  Description of Artificial Sequence: Synthetic whey; inner sequence and 3'  sequence

SEQ ID NO: 46058 - DNA, 53 bp, Artificial Sequence; identical to SEQ ID NO: 2454
  Description of Artificial Sequence: Synthetic whey; inner sequence and 3'  sequence

SEQ ID NO: 46059 - DNA, 53 bp, Artificial Sequence; identical to SEQ ID NO: 18818
  Description of Artificial Sequence: Synthetic whey; inner sequence and 3'  sequence

SEQ ID NO: 46060 - DNA, 53 bp, Artificial Sequence; identical to SEQ ID NO: 2381
  Description of Artificial Sequence: Synthetic whey; inner sequence and 3'  sequence

SEQ ID NO: 46061 - DNA, 53 bp, Artificial Sequence; identical to SEQ ID NO: 2079
  Description of Artificial Sequence: Synthetic whey; inner sequence and 3'  sequence

SEQ ID NO: 46062 - DNA, 53 bp, Artificial Sequence; identical to SEQ ID NO: 2037
  Description of Artificial Sequence: Synthetic whey; inner sequence and 3'  sequence

SEQ ID NO: 46063 - DNA, 54 bp, Artificial Sequence; identical to SEQ ID NO: 18373
  Description of Artificial Sequence: Synthetic whey; inner sequence and 3'  sequence

SEQ ID NO: 46064 - DNA, 53 bp, Artificial Sequence; identical to SEQ ID NO: 30252
  Description of Artificial Sequence: Synthetic whey; inner sequence and 3'  sequence

SEQ ID NO: 46065 - DNA, 53 bp, Artificial Sequence; identical to SEQ ID NO: 2086
  Description of Artificial Sequence: Synthetic whey; inner sequence and 3'  sequence

SEQ ID NO: 46066 - DNA, 53 bp, Artificial Sequence; identical to SEQ ID NO: 2051
  Description of Artificial Sequence: Synthetic whey; inner sequence and 3'  sequence

SEQ ID NO: 46067 - DNA, 53 bp, Artificial Sequence; identical to SEQ ID NO: 2041
  Description of Artificial Sequence: Synthetic whey; inner sequence and 3'  sequence

SEQ ID NO: 46068 - DNA, 53 bp, Artificial Sequence; identical to SEQ ID NO: 2016
  Description of Artificial Sequence: Synthetic whey; inner sequence and 3'  sequence

SEQ ID NO: 46069 - DNA, 53 bp, Artificial Sequence; identical to SEQ ID NO: 22495
  Description of Artificial Sequence: Synthetic whey; inner sequence and 3'  sequence

SEQ ID NO: 46070 - DNA, 53 bp, Artificial Sequence; identical to SEQ ID NO: 2077
  Description of Artificial Sequence: Synthetic whey; inner sequence and 3'  sequence

SEQ ID NO: 46071 - DNA, 53 bp, Artificial Sequence; identical to SEQ ID NO: 2013
  Description of Artificial Sequence: Synthetic whey; inner sequence and 3'  sequence

SEQ ID NO: 46072 - DNA, 53 bp, Artificial Sequence; identical to SEQ ID NO: 30243
  Description of Artificial Sequence: Synthetic whey; inner sequence and 3'  sequence

SEQ ID NO: 46073 - DNA, 53 bp, Artificial Sequence; identical to SEQ ID NO: 6659
  Description of Artificial Sequence: Synthetic whey; inner sequence and 3'  sequence

SEQ ID NO: 46074 - DNA, 53 bp, Artificial Sequence; identical to SEQ ID NO: 2017
  Description of Artificial Sequence: Synthetic whey; inner sequence and 3'  sequence

SEQ ID NO: 46075 - DNA, 53 bp, Artificial Sequence; identical to SEQ ID NO: 2025
  Description of Artificial Sequence: Synthetic whey; inner sequence and 3'  sequence

SEQ ID NO: 46076 - DNA, 53 bp, Artificial Sequence; identical to SEQ ID NO: 30743
  Description of Artificial Sequence: Synthetic whey; inner sequence and 3'  sequence

SEQ ID NO: 46077 - DNA, 53 bp, Artificial Sequence; identical to SEQ ID NO: 2117
  Description of Artificial Sequence: Synthetic whey; inner sequence and 3'  sequence

SEQ ID NO: 46078 - DNA, 53 bp, Artificial Sequence; identical to SEQ ID NO: 2138
  Description of Artificial Sequence: Synthetic whey; inner sequence and 3'  sequence

SEQ ID NO: 46079 - DNA, 53 bp, Artificial Sequence; identical to SEQ ID NO: 2217
  Description of Artificial Sequence: Synthetic whey; inner sequence and 3'  sequence

SEQ ID NO: 46080 - DNA, 53 bp, Artificial Sequence; identical to SEQ ID NO: 22504
  Description of Artificial Sequence: Synthetic whey; inner sequence and 3'  sequence

SEQ ID NO: 46081 - DNA, 53 bp, Artificial Sequence; identical to SEQ ID NO: 30310
  Description of Artificial Sequence: Synthetic whey; inner sequence and 3'  sequence

SEQ ID NO: 46082 - DNA, 53 bp, Artificial Sequence; identical to SEQ ID NO: 2243
  Description of Artificial Sequence: Synthetic whey; inner sequence and 3'  sequence

SEQ ID NO: 46083 - DNA, 53 bp, Artificial Sequence; identical to SEQ ID NO: 2174
  Description of Artificial Sequence: Synthetic whey; inner sequence and 3'  sequence

SEQ ID NO: 46084 - DNA, 53 bp, Artificial Sequence; identical to SEQ ID NO: 2697
  Description of Artificial Sequence: Synthetic whey; inner sequence and 3'  sequence

SEQ ID NO: 46085 - DNA, 53 bp, Artificial Sequence; identical to SEQ ID NO: 2027
  Description of Artificial Sequence: Synthetic whey; inner sequence and 3'  sequence

SEQ ID NO: 46086 - DNA, 53 bp, Artificial Sequence; identical to SEQ ID NO: 2344
  Description of Artificial Sequence: Synthetic whey; inner sequence and 3'  sequence

SEQ ID NO: 46087 - DNA, 53 bp, Artificial Sequence; identical to SEQ ID NO: 2049
  Description of Artificial Sequence: Synthetic whey; inner sequence and 3'  sequence

SEQ ID NO: 46088 - DNA, 53 bp, Artificial Sequence; identical to SEQ ID NO: 2194
  Description of Artificial Sequence: Synthetic whey; inner sequence and 3'  sequence

SEQ ID NO: 46089 - DNA, 53 bp, Artificial Sequence; identical to SEQ ID NO: 2372
  Description of Artificial Sequence: Synthetic whey; inner sequence and 3'  sequence

SEQ ID NO: 46090 - DNA, 53 bp, Artificial Sequence; identical to SEQ ID NO: 18603
  Description of Artificial Sequence: Synthetic whey; inner sequence and 3'  sequence

SEQ ID NO: 46091 - DNA, 53 bp, Artificial Sequence; identical to SEQ ID NO: 30477
  Description of Artificial Sequence: Synthetic whey; inner sequence and 3'  sequence

SEQ ID NO: 46092 - DNA, 53 bp, Artificial Sequence; identical to SEQ ID NO: 2184
  Description of Artificial Sequence: Synthetic whey; inner sequence and 3'  sequence

SEQ ID NO: 46093 - DNA, 53 bp, Artificial Sequence; identical to SEQ ID NO: 2290
  Description of Artificial Sequence: Synthetic whey; inner sequence and 3'  sequence

SEQ ID NO: 46094 - DNA, 53 bp, Artificial Sequence; identical to SEQ ID NO: 2249
  Description of Artificial Sequence: Synthetic whey; inner sequence and 3'  sequence

SEQ ID NO: 46095 - DNA, 53 bp, Artificial Sequence; identical to SEQ ID NO: 22540
  Description of Artificial Sequence: Synthetic whey; inner sequence and 3'  sequence

SEQ ID NO: 46096 - DNA, 53 bp, Artificial Sequence; identical to SEQ ID NO: 22105
  Description of Artificial Sequence: Synthetic whey; inner sequence and 3'  sequence

SEQ ID NO: 46097 - DNA, 53 bp, Artificial Sequence; identical to SEQ ID NO: 2228
  Description of Artificial Sequence: Synthetic whey; inner sequence and 3'  sequence

SEQ ID NO: 46098 - DNA, 53 bp, Artificial Sequence; identical to SEQ ID NO: 2019
  Description of Artificial Sequence: Synthetic whey; inner sequence and 3'  sequence

SEQ ID NO: 46099 - DNA, 53 bp, Artificial Sequence; identical to SEQ ID NO: 2281
  Description of Artificial Sequence: Synthetic whey; inner sequence and 3'  sequence

SEQ ID NO: 46100 - DNA, 53 bp, Artificial Sequence; identical to SEQ ID NO: 22486
  Description of Artificial Sequence: Synthetic whey; inner sequence and 3'  sequence

SEQ ID NO: 46101 - DNA, 53 bp, Artificial Sequence; identical to SEQ ID NO: 2053
  Description of Artificial Sequence: Synthetic whey; inner sequence and 3'  sequence

SEQ ID NO: 46102 - DNA, 53 bp, Artificial Sequence; identical to SEQ ID NO: 2442
  Description of Artificial Sequence: Synthetic whey; inner sequence and 3'  sequence

SEQ ID NO: 46103 - DNA, 53 bp, Artificial Sequence; identical to SEQ ID NO: 2072
  Description of Artificial Sequence: Synthetic whey; inner sequence and 3'  sequence

SEQ ID NO: 46104 - DNA, 53 bp, Artificial Sequence; identical to SEQ ID NO: 2283
  Description of Artificial Sequence: Synthetic whey; inner sequence and 3'  sequence

SEQ ID NO: 46105 - DNA, 53 bp, Artificial Sequence; identical to SEQ ID NO: 2123
  Description of Artificial Sequence: Synthetic whey; inner sequence and 3'  sequence

SEQ ID NO: 46106 - DNA, 53 bp, Artificial Sequence; identical to SEQ ID NO: 14997
  Description of Artificial Sequence: Synthetic whey; inner sequence and 3'  sequence

SEQ ID NO: 46107 - DNA, 53 bp, Artificial Sequence; identical to SEQ ID NO: 2776
  Description of Artificial Sequence: Synthetic whey; inner sequence and 3'  sequence

SEQ ID NO: 46108 - DNA, 54 bp, Artificial Sequence; identical to SEQ ID NO: 2971
  Description of Artificial Sequence: Synthetic whey; inner sequence and 3'  sequence

SEQ ID NO: 46109 - DNA, 53 bp, Artificial Sequence; identical to SEQ ID NO: 30379
  Description of Artificial Sequence: Synthetic whey; inner sequence and 3'  sequence

SEQ ID NO: 46110 - DNA, 53 bp, Artificial Sequence; identical to SEQ ID NO: 2232
  Description of Artificial Sequence: Synthetic whey; inner sequence and 3'  sequence

SEQ ID NO: 46111 - DNA, 53 bp, Artificial Sequence
  Description of Artificial Sequence: Synthetic whey; inner sequence and 3'  sequence
gtcactgtgcctgaccttcaagttgcggcattgactagtacatgaccacttga

SEQ ID NO: 46112 - DNA, 53 bp, Artificial Sequence
  Description of Artificial Sequence: Synthetic whey; inner sequence and 3'  sequence
gcacgactcgcaccctatcatgttggcatgttgactagtacatgaccacttga

SEQ ID NO: 46113 - DNA, 53 bp, Artificial Sequence; identical to SEQ ID NO: 2073
  Description of Artificial Sequence: Synthetic whey; inner sequence and 3'  sequence

SEQ ID NO: 46114 - DNA, 53 bp, Artificial Sequence; identical to SEQ ID NO: 22524
  Description of Artificial Sequence: Synthetic whey; inner sequence and 3'  sequence

SEQ ID NO: 46115 - DNA, 53 bp, Artificial Sequence; identical to SEQ ID NO: 6336
  Description of Artificial Sequence: Synthetic whey; inner sequence and 3'  sequence

SEQ ID NO: 46116 - DNA, 53 bp, Artificial Sequence
  Description of Artificial Sequence: Synthetic whey; inner sequence and 3'  sequence
acgacaacgcgatgacgtacgtacgatgtgttgactagtacatgaccacttga

SEQ ID NO: 46117 - DNA, 53 bp, Artificial Sequence; identical to SEQ ID NO: 30735
  Description of Artificial Sequence: Synthetic whey; inner sequence and 3'  sequence

SEQ ID NO: 46118 - DNA, 53 bp, Artificial Sequence; identical to SEQ ID NO: 18211
  Description of Artificial Sequence: Synthetic whey; inner sequence and 3'  sequence

SEQ ID NO: 46119 - DNA, 53 bp, Artificial Sequence; identical to SEQ ID NO: 2613
  Description of Artificial Sequence: Synthetic whey; inner sequence and 3'  sequence

SEQ ID NO: 46120 - DNA, 53 bp, Artificial Sequence; identical to SEQ ID NO: 2031
  Description of Artificial Sequence: Synthetic whey; inner sequence and 3'  sequence

SEQ ID NO: 46121 - DNA, 53 bp, Artificial Sequence; identical to SEQ ID NO: 2343
  Description of Artificial Sequence: Synthetic whey; inner sequence and 3'  sequence

SEQ ID NO: 46122 - DNA, 53 bp, Artificial Sequence; identical to SEQ ID NO: 2047
  Description of Artificial Sequence: Synthetic whey; inner sequence and 3'  sequence

SEQ ID NO: 46123 - DNA, 53 bp, Artificial Sequence; identical to SEQ ID NO: 2684
  Description of Artificial Sequence: Synthetic whey; inner sequence and 3'  sequence

SEQ ID NO: 46124 - DNA, 53 bp, Artificial Sequence; identical to SEQ ID NO: 2212
  Description of Artificial Sequence: Synthetic whey; inner sequence and 3'  sequence

SEQ ID NO: 46125 - DNA, 53 bp, Artificial Sequence; identical to SEQ ID NO: 30436
  Description of Artificial Sequence: Synthetic whey; inner sequence and 3'  sequence

SEQ ID NO: 46126 - DNA, 53 bp, Artificial Sequence; identical to SEQ ID NO: 10946
  Description of Artificial Sequence: Synthetic whey; inner sequence and 3'  sequence

SEQ ID NO: 46127 - DNA, 53 bp, Artificial Sequence
  Description of Artificial Sequence: Synthetic whey; inner sequence and 3'  sequence
acgtcacgatgcacaagggcgtgctgcacgttgactagtacatgaccacttga

SEQ ID NO: 46128 - DNA, 53 bp, Artificial Sequence; identical to SEQ ID NO: 2467
  Description of Artificial Sequence: Synthetic whey; inner sequence and 3'  sequence

SEQ ID NO: 46129 - DNA, 53 bp, Artificial Sequence; identical to SEQ ID NO: 2067
  Description of Artificial Sequence: Synthetic whey; inner sequence and 3'  sequence

SEQ ID NO: 46130 - DNA, 53 bp, Artificial Sequence; identical to SEQ ID NO: 30315
  Description of Artificial Sequence: Synthetic whey; inner sequence and 3'  sequence

SEQ ID NO: 46131 - DNA, 53 bp, Artificial Sequence; identical to SEQ ID NO: 30985
  Description of Artificial Sequence: Synthetic whey; inner sequence and 3'  sequence

SEQ ID NO: 46132 - DNA, 53 bp, Artificial Sequence; identical to SEQ ID NO: 2172
  Description of Artificial Sequence: Synthetic whey; inner sequence and 3'  sequence

SEQ ID NO: 46133 - DNA, 53 bp, Artificial Sequence
  Description of Artificial Sequence: Synthetic whey; inner sequence and 3'  sequence
gtacgcatcgtcccgtcatgtggttgtggattgactagtacatgaccacttga

SEQ ID NO: 46134 - DNA, 53 bp, Artificial Sequence; identical to SEQ ID NO: 2272
  Description of Artificial Sequence: Synthetic whey; inner sequence and 3'  sequence

SEQ ID NO: 46135 - DNA, 53 bp, Artificial Sequence; identical to SEQ ID NO: 2359
  Description of Artificial Sequence: Synthetic whey; inner sequence and 3'  sequence

SEQ ID NO: 46136 - DNA, 53 bp, Artificial Sequence; identical to SEQ ID NO: 2886
  Description of Artificial Sequence: Synthetic whey; inner sequence and 3'  sequence

SEQ ID NO: 46137 - DNA, 53 bp, Artificial Sequence; identical to SEQ ID NO: 2229
  Description of Artificial Sequence: Synthetic whey; inner sequence and 3'  sequence

SEQ ID NO: 46138 - DNA, 53 bp, Artificial Sequence; identical to SEQ ID NO: 2379
  Description of Artificial Sequence: Synthetic whey; inner sequence and 3'  sequence

SEQ ID NO: 46139 - DNA, 53 bp, Artificial Sequence; identical to SEQ ID NO: 30471
  Description of Artificial Sequence: Synthetic whey; inner sequence and 3'  sequence

SEQ ID NO: 46140 - DNA, 53 bp, Artificial Sequence
  Description of Artificial Sequence: Synthetic whey; inner sequence and 3'  sequence
acgtcacacgtcgagttacgctacgacacgttgactagtacatgaccacttga

SEQ ID NO: 46141 - DNA, 53 bp, Artificial Sequence; identical to SEQ ID NO: 30244
  Description of Artificial Sequence: Synthetic whey; inner sequence and 3'  sequence

SEQ ID NO: 46142 - DNA, 53 bp, Artificial Sequence; identical to SEQ ID NO: 14775
  Description of Artificial Sequence: Synthetic whey; inner sequence and 3'  sequence

SEQ ID NO: 46143 - DNA, 53 bp, Artificial Sequence; identical to SEQ ID NO: 2061
  Description of Artificial Sequence: Synthetic whey; inner sequence and 3'  sequence

SEQ ID NO: 46144 - DNA, 53 bp, Artificial Sequence; identical to SEQ ID NO: 2029
  Description of Artificial Sequence: Synthetic whey; inner sequence and 3'  sequence

SEQ ID NO: 46145 - DNA, 53 bp, Artificial Sequence; identical to SEQ ID NO: 30108
  Description of Artificial Sequence: Synthetic whey; inner sequence and 3'  sequence

SEQ ID NO: 46146 - DNA, 53 bp, Artificial Sequence; identical to SEQ ID NO: 2611
  Description of Artificial Sequence: Synthetic whey; inner sequence and 3'  sequence

SEQ ID NO: 46147 - DNA, 53 bp, Artificial Sequence; identical to SEQ ID NO: 2457
  Description of Artificial Sequence: Synthetic whey; inner sequence and 3'  sequence

SEQ ID NO: 46148 - DNA, 53 bp, Artificial Sequence; identical to SEQ ID NO: 2178
  Description of Artificial Sequence: Synthetic whey; inner sequence and 3'  sequence

SEQ ID NO: 46149 - DNA, 53 bp, Artificial Sequence; identical to SEQ ID NO: 2746
  Description of Artificial Sequence: Synthetic whey; inner sequence and 3'  sequence

SEQ ID NO: 46150 - DNA, 53 bp, Artificial Sequence; identical to SEQ ID NO: 2225
  Description of Artificial Sequence: Synthetic whey; inner sequence and 3'  sequence

SEQ ID NO: 46151 - DNA, 53 bp, Artificial Sequence
  Description of Artificial Sequence: Synthetic whey; inner sequence and 3'  sequence
gtacgcatcgtcccttcatgtggttccgtattgactagtacatgaccacttga

SEQ ID NO: 46152 - DNA, 53 bp, Artificial Sequence; identical to SEQ ID NO: 18859
  Description of Artificial Sequence: Synthetic whey; inner sequence and 3'  sequence

SEQ ID NO: 46153 - DNA, 52 bp, Artificial Sequence; identical to SEQ ID NO: 2251
  Description of Artificial Sequence: Synthetic whey; inner sequence and 3'  sequence

SEQ ID NO: 46154 - DNA, 54 bp, Artificial Sequence; identical to SEQ ID NO: 2221
  Description of Artificial Sequence: Synthetic whey; inner sequence and 3'  sequence

SEQ ID NO: 46155 - DNA, 53 bp, Artificial Sequence; identical to SEQ ID NO: 30147
  Description of Artificial Sequence: Synthetic whey; inner sequence and 3'  sequence

SEQ ID NO: 46156 - DNA, 53 bp, Artificial Sequence; identical to SEQ ID NO: 18978
  Description of Artificial Sequence: Synthetic whey; inner sequence and 3'  sequence

SEQ ID NO: 46157 - DNA, 53 bp, Artificial Sequence; identical to SEQ ID NO: 10876
  Description of Artificial Sequence: Synthetic whey; inner sequence and 3'  sequence

SEQ ID NO: 46158 - DNA, 53 bp, Artificial Sequence; identical to SEQ ID NO: 22617
  Description of Artificial Sequence: Synthetic whey; inner sequence and 3'  sequence

SEQ ID NO: 46159 - DNA, 53 bp, Artificial Sequence
  Description of Artificial Sequence: Synthetic whey; inner sequence and 3'  sequence
cgtgcacacgacgacatgcactacgttgccttgactagtacatgaccacttga

SEQ ID NO: 46160 - DNA, 53 bp, Artificial Sequence; identical to SEQ ID NO: 2038
  Description of Artificial Sequence: Synthetic whey; inner sequence and 3'  sequence

SEQ ID NO: 46161 - DNA, 53 bp, Artificial Sequence; identical to SEQ ID NO: 2622
  Description of Artificial Sequence: Synthetic whey; inner sequence and 3'  sequence

SEQ ID NO: 46162 - DNA, 53 bp, Artificial Sequence; identical to SEQ ID NO: 2144
  Description of Artificial Sequence: Synthetic whey; inner sequence and 3'  sequence

SEQ ID NO: 46163 - DNA, 53 bp, Artificial Sequence; identical to SEQ ID NO: 2231
  Description of Artificial Sequence: Synthetic whey; inner sequence and 3'  sequence

SEQ ID NO: 46164 - DNA, 52 bp, Artificial Sequence
  Description of Artificial Sequence: Synthetic whey; inner sequence and 3'  sequence
cgtgtgtgacgtacatgacgtgcttcgtgttgactagtacatgaccacttga

SEQ ID NO: 46165 - DNA, 53 bp, Artificial Sequence; identical to SEQ ID NO: 22151
  Description of Artificial Sequence: Synthetic whey; inner sequence and 3'  sequence

SEQ ID NO: 46166 - DNA, 53 bp, Artificial Sequence
  Description of Artificial Sequence: Synthetic whey; inner sequence and 3'  sequence
gtcactgtgcctgaccgtcaagttgtggcattgactagtacatgaccacttga

SEQ ID NO: 46167 - DNA, 53 bp, Artificial Sequence; identical to SEQ ID NO: 2151
  Description of Artificial Sequence: Synthetic whey; inner sequence and 3'  sequence

SEQ ID NO: 46168 - DNA, 53 bp, Artificial Sequence; identical to SEQ ID NO: 30497
  Description of Artificial Sequence: Synthetic whey; inner sequence and 3'  sequence

SEQ ID NO: 46169 - DNA, 53 bp, Artificial Sequence; identical to SEQ ID NO: 2303
  Description of Artificial Sequence: Synthetic whey; inner sequence and 3'  sequence

SEQ ID NO: 46170 - DNA, 53 bp, Artificial Sequence; identical to SEQ ID NO: 2098
  Description of Artificial Sequence: Synthetic whey; inner sequence and 3'  sequence

SEQ ID NO: 46171 - DNA, 53 bp, Artificial Sequence; identical to SEQ ID NO: 2352
  Description of Artificial Sequence: Synthetic whey; inner sequence and 3'  sequence

SEQ ID NO: 46172 - DNA, 53 bp, Artificial Sequence; identical to SEQ ID NO: 2050
  Description of Artificial Sequence: Synthetic whey; inner sequence and 3'  sequence

SEQ ID NO: 46173 - DNA, 53 bp, Artificial Sequence; identical to SEQ ID NO: 22551
  Description of Artificial Sequence: Synthetic whey; inner sequence and 3'  sequence

SEQ ID NO: 46174 - DNA, 53 bp, Artificial Sequence; identical to SEQ ID NO: 2026
  Description of Artificial Sequence: Synthetic whey; inner sequence and 3'  sequence

SEQ ID NO: 46175 - DNA, 53 bp, Artificial Sequence; identical to SEQ ID NO: 30526
  Description of Artificial Sequence: Synthetic whey; inner sequence and 3'  sequence

SEQ ID NO: 46176 - DNA, 53 bp, Artificial Sequence; identical to SEQ ID NO: 2353
  Description of Artificial Sequence: Synthetic whey; inner sequence and 3'  sequence

SEQ ID NO: 46177 - DNA, 53 bp, Artificial Sequence; identical to SEQ ID NO: 22560
  Description of Artificial Sequence: Synthetic whey; inner sequence and 3'  sequence

SEQ ID NO: 46178 - DNA, 53 bp, Artificial Sequence; identical to SEQ ID NO: 2181
  Description of Artificial Sequence: Synthetic whey; inner sequence and 3'  sequence

SEQ ID NO: 46179 - DNA, 53 bp, Artificial Sequence; identical to SEQ ID NO: 2728
  Description of Artificial Sequence: Synthetic whey; inner sequence and 3'  sequence

SEQ ID NO: 46180 - DNA, 53 bp, Artificial Sequence; identical to SEQ ID NO: 2024
  Description of Artificial Sequence: Synthetic whey; inner sequence and 3'  sequence

SEQ ID NO: 46181 - DNA, 53 bp, Artificial Sequence; identical to SEQ ID NO: 2884
  Description of Artificial Sequence: Synthetic whey; inner sequence and 3'  sequence

SEQ ID NO: 46182 - DNA, 53 bp, Artificial Sequence
  Description of Artificial Sequence: Synthetic whey; inner sequence and 3'  sequence
acgtcacggcatgcgtcacactgatgcatgttgactagtacatgaccacttga

SEQ ID NO: 46183 - DNA, 53 bp, Artificial Sequence; identical to SEQ ID NO: 2617
  Description of Artificial Sequence: Synthetic whey; inner sequence and 3'  sequence

SEQ ID NO: 46184 - DNA, 53 bp, Artificial Sequence; identical to SEQ ID NO: 34743
  Description of Artificial Sequence: Synthetic whey; inner sequence and 3'  sequence

SEQ ID NO: 46185 - DNA, 53 bp, Artificial Sequence; identical to SEQ ID NO: 2419
  Description of Artificial Sequence: Synthetic whey; inner sequence and 3'  sequence

SEQ ID NO: 46186 - DNA, 53 bp, Artificial Sequence; identical to SEQ ID NO: 2891
  Description of Artificial Sequence: Synthetic whey; inner sequence and 3'  sequence

SEQ ID NO: 46187 - DNA, 53 bp, Artificial Sequence; identical to SEQ ID NO: 2365
  Description of Artificial Sequence: Synthetic whey; inner sequence and 3'  sequence

SEQ ID NO: 46188 - DNA, 53 bp, Artificial Sequence; identical to SEQ ID NO: 2615
  Description of Artificial Sequence: Synthetic whey; inner sequence and 3'  sequence

SEQ ID NO: 46189 - DNA, 53 bp, Artificial Sequence
  Description of Artificial Sequence: Synthetic whey; inner sequence and 3'  sequence
gtacgactcgcaccctatcatgtaggcatgttgactagtacatgaccacttga

SEQ ID NO: 46190 - DNA, 53 bp, Artificial Sequence; identical to SEQ ID NO: 30541
  Description of Artificial Sequence: Synthetic whey; inner sequence and 3'  sequence

SEQ ID NO: 46191 - DNA, 53 bp, Artificial Sequence
  Description of Artificial Sequence: Synthetic whey; inner sequence and 3'  sequence
gtcactgcgcctgaccgtcaagttgcggcattgactagtacatgaccacttga

SEQ ID NO: 46192 - DNA, 53 bp, Artificial Sequence; identical to SEQ ID NO: 2414
  Description of Artificial Sequence: Synthetic whey; inner sequence and 3'  sequence

SEQ ID NO: 46193 - DNA, 53 bp, Artificial Sequence; identical to SEQ ID NO: 30400
  Description of Artificial Sequence: Synthetic whey; inner sequence and 3'  sequence

SEQ ID NO: 46194 - DNA, 53 bp, Artificial Sequence; identical to SEQ ID NO: 30793
  Description of Artificial Sequence: Synthetic whey; inner sequence and 3'  sequence

SEQ ID NO: 46195 - DNA, 53 bp, Artificial Sequence; identical to SEQ ID NO: 2129
  Description of Artificial Sequence: Synthetic whey; inner sequence and 3'  sequence

SEQ ID NO: 46196 - DNA, 53 bp, Artificial Sequence; identical to SEQ ID NO: 18861
  Description of Artificial Sequence: Synthetic whey; inner sequence and 3'  sequence

SEQ ID NO: 46197 - DNA, 53 bp, Artificial Sequence; identical to SEQ ID NO: 2320
  Description of Artificial Sequence: Synthetic whey; inner sequence and 3'  sequence

SEQ ID NO: 46198 - DNA, 53 bp, Artificial Sequence; identical to SEQ ID NO: 2560
  Description of Artificial Sequence: Synthetic whey; inner sequence and 3'  sequence

SEQ ID NO: 46199 - DNA, 53 bp, Artificial Sequence; identical to SEQ ID NO: 30939
  Description of Artificial Sequence: Synthetic whey; inner sequence and 3'  sequence

SEQ ID NO: 46200 - DNA, 53 bp, Artificial Sequence; identical to SEQ ID NO: 18513
  Description of Artificial Sequence: Synthetic whey; inner sequence and 3'  sequence

SEQ ID NO: 46201 - DNA, 53 bp, Artificial Sequence; identical to SEQ ID NO: 2202
  Description of Artificial Sequence: Synthetic whey; inner sequence and 3'  sequence

SEQ ID NO: 46202 - DNA, 53 bp, Artificial Sequence; identical to SEQ ID NO: 2060
  Description of Artificial Sequence: Synthetic whey; inner sequence and 3'  sequence

SEQ ID NO: 46203 - DNA, 53 bp, Artificial Sequence; identical to SEQ ID NO: 22302
  Description of Artificial Sequence: Synthetic whey; inner sequence and 3'  sequence

SEQ ID NO: 46204 - DNA, 53 bp, Artificial Sequence; identical to SEQ ID NO: 2517
  Description of Artificial Sequence: Synthetic whey; inner sequence and 3'  sequence

SEQ ID NO: 46205 - DNA, 53 bp, Artificial Sequence; identical to SEQ ID NO: 22889
  Description of Artificial Sequence: Synthetic whey; inner sequence and 3'  sequence

SEQ ID NO: 46206 - DNA, 53 bp, Artificial Sequence; identical to SEQ ID NO: 2065
  Description of Artificial Sequence: Synthetic whey; inner sequence and 3'  sequence

SEQ ID NO: 46207 - DNA, 53 bp, Artificial Sequence; identical to SEQ ID NO: 22984
  Description of Artificial Sequence: Synthetic whey; inner sequence and 3'  sequence

SEQ ID NO: 46208 - DNA, 53 bp, Artificial Sequence; identical to SEQ ID NO: 18399
  Description of Artificial Sequence: Synthetic whey; inner sequence and 3'  sequence

SEQ ID NO: 46209 - DNA, 53 bp, Artificial Sequence; identical to SEQ ID NO: 2823
  Description of Artificial Sequence: Synthetic whey; inner sequence and 3'  sequence

SEQ ID NO: 46210 - DNA, 53 bp, Artificial Sequence; identical to SEQ ID NO: 2877
  Description of Artificial Sequence: Synthetic whey; inner sequence and 3'  sequence

SEQ ID NO: 46211 - DNA, 53 bp, Artificial Sequence; identical to SEQ ID NO: 22917
  Description of Artificial Sequence: Synthetic whey; inner sequence and 3'  sequence

SEQ ID NO: 46212 - DNA, 53 bp, Artificial Sequence
  Description of Artificial Sequence: Synthetic whey; inner sequence and 3'  sequence
aacgtgacgcgatcggtacgtgacgttgcgttgactagtacatgaccacttga

SEQ ID NO: 46213 - DNA, 53 bp, Artificial Sequence; identical to SEQ ID NO: 2192
  Description of Artificial Sequence: Synthetic whey; inner sequence and 3'  sequence

SEQ ID NO: 46214 - DNA, 53 bp, Artificial Sequence
  Description of Artificial Sequence: Synthetic whey; inner sequence and 3'  sequence
cgacacagtgcgtatcgtacgtcgtgccgcttgactagtacatgaccacttga

SEQ ID NO: 46215 - DNA, 53 bp, Artificial Sequence; identical to SEQ ID NO: 30233
  Description of Artificial Sequence: Synthetic whey; inner sequence and 3'  sequence

SEQ ID NO: 46216 - DNA, 53 bp, Artificial Sequence
  Description of Artificial Sequence: Synthetic whey; inner sequence and 3'  sequence
gtcactgtgcctgcccgtcaagttgcggcattgactagtacatgaccacttga

SEQ ID NO: 46217 - DNA, 53 bp, Artificial Sequence; identical to SEQ ID NO: 2780
  Description of Artificial Sequence: Synthetic whey; inner sequence and 3'  sequence

SEQ ID NO: 46218 - DNA, 53 bp, Artificial Sequence; identical to SEQ ID NO: 2204
  Description of Artificial Sequence: Synthetic whey; inner sequence and 3'  sequence

SEQ ID NO: 46219 - DNA, 53 bp, Artificial Sequence
  Description of Artificial Sequence: Synthetic whey; inner sequence and 3'  sequence
catgcgtcatgtccgtacgttcccgtcatgttgactagtacatgaccacttga

SEQ ID NO: 46220 - DNA, 53 bp, Artificial Sequence; identical to SEQ ID NO: 6356
  Description of Artificial Sequence: Synthetic whey; inner sequence and 3'  sequence

SEQ ID NO: 46221 - DNA, 53 bp, Artificial Sequence; identical to SEQ ID NO: 30381
  Description of Artificial Sequence: Synthetic whey; inner sequence and 3'  sequence

SEQ ID NO: 46222 - DNA, 53 bp, Artificial Sequence; identical to SEQ ID NO: 6960
  Description of Artificial Sequence: Synthetic whey; inner sequence and 3'  sequence

SEQ ID NO: 46223 - DNA, 53 bp, Artificial Sequence; identical to SEQ ID NO: 2090
  Description of Artificial Sequence: Synthetic whey; inner sequence and 3'  sequence

SEQ ID NO: 46224 - DNA, 53 bp, Artificial Sequence; identical to SEQ ID NO: 2446
  Description of Artificial Sequence: Synthetic whey; inner sequence and 3'  sequence

SEQ ID NO: 46225 - DNA, 53 bp, Artificial Sequence
  Description of Artificial Sequence: Synthetic whey; inner sequence and 3'  sequence
acgatgcgtgacaccgtgctgcgtgtgaccttgactagtacatgaccacttga

SEQ ID NO: 46226 - DNA, 53 bp, Artificial Sequence; identical to SEQ ID NO: 2437
  Description of Artificial Sequence: Synthetic whey; inner sequence and 3'  sequence

SEQ ID NO: 46227 - DNA, 53 bp, Artificial Sequence
  Description of Artificial Sequence: Synthetic whey; inner sequence and 3'  sequence
gtacgcaacgtaccgtatcgtggccatgtgttgactagtacatgaccacttga

SEQ ID NO: 46228 - DNA, 53 bp, Artificial Sequence; identical to SEQ ID NO: 30701
  Description of Artificial Sequence: Synthetic whey; inner sequence and 3'  sequence

SEQ ID NO: 46229 - DNA, 53 bp, Artificial Sequence; identical to SEQ ID NO: 30934
  Description of Artificial Sequence: Synthetic whey; inner sequence and 3'  sequence

SEQ ID NO: 46230 - DNA, 53 bp, Artificial Sequence; identical to SEQ ID NO: 22789
  Description of Artificial Sequence: Synthetic whey; inner sequence and 3'  sequence

SEQ ID NO: 46231 - DNA, 53 bp, Artificial Sequence; identical to SEQ ID NO: 2285
  Description of Artificial Sequence: Synthetic whey; inner sequence and 3'  sequence

SEQ ID NO: 46232 - DNA, 53 bp, Artificial Sequence; identical to SEQ ID NO: 30699
  Description of Artificial Sequence: Synthetic whey; inner sequence and 3'  sequence

SEQ ID NO: 46233 - DNA, 53 bp, Artificial Sequence; identical to SEQ ID NO: 30995
  Description of Artificial Sequence: Synthetic whey; inner sequence and 3'  sequence

SEQ ID NO: 46234 - DNA, 52 bp, Artificial Sequence; identical to SEQ ID NO: 2193
  Description of Artificial Sequence: Synthetic whey; inner sequence and 3'  sequence

SEQ ID NO: 46235 - DNA, 53 bp, Artificial Sequence; identical to SEQ ID NO: 22994
  Description of Artificial Sequence: Synthetic whey; inner sequence and 3'  sequence

SEQ ID NO: 46236 - DNA, 53 bp, Artificial Sequence; identical to SEQ ID NO: 22426
  Description of Artificial Sequence: Synthetic whey; inner sequence and 3'  sequence

SEQ ID NO: 46237 - DNA, 53 bp, Artificial Sequence
  Description of Artificial Sequence: Synthetic whey; inner sequence and 3'  sequence
gtcactgtgcctgaccgtcaagttgcggtattgactagtacatgaccacttga

SEQ ID NO: 46238 - DNA, 53 bp, Artificial Sequence
  Description of Artificial Sequence: Synthetic whey; inner sequence and 3'  sequence
gtcatgccatcccctcgagtgtgacaggtattgactagtacatgaccacttga

SEQ ID NO: 46239 - DNA, 53 bp, Artificial Sequence; identical to SEQ ID NO: 2358
  Description of Artificial Sequence: Synthetic whey; inner sequence and 3'  sequence

SEQ ID NO: 46240 - DNA, 53 bp, Artificial Sequence; identical to SEQ ID NO: 30278
  Description of Artificial Sequence: Synthetic whey; inner sequence and 3'  sequence

SEQ ID NO: 46241 - DNA, 53 bp, Artificial Sequence; identical to SEQ ID NO: 30924
  Description of Artificial Sequence: Synthetic whey; inner sequence and 3'  sequence

SEQ ID NO: 46242 - DNA, 53 bp, Artificial Sequence; identical to SEQ ID NO: 2161
  Description of Artificial Sequence: Synthetic whey; inner sequence and 3'  sequence

SEQ ID NO: 46243 - DNA, 53 bp, Artificial Sequence; identical to SEQ ID NO: 2727
  Description of Artificial Sequence: Synthetic whey; inner sequence and 3'  sequence

SEQ ID NO: 46244 - DNA, 53 bp, Artificial Sequence; identical to SEQ ID NO: 10868
  Description of Artificial Sequence: Synthetic whey; inner sequence and 3'  sequence

SEQ ID NO: 46245 - DNA, 53 bp, Artificial Sequence
  Description of Artificial Sequence: Synthetic whey; inner sequence and 3'  sequence
gtcatgcacgaacactatcatgtaggcatgttgactagtacatgaccacttga

SEQ ID NO: 46246 - DNA, 53 bp, Artificial Sequence; identical to SEQ ID NO: 2429
  Description of Artificial Sequence: Synthetic whey; inner sequence and 3'  sequence

SEQ ID NO: 46247 - DNA, 53 bp, Artificial Sequence; identical to SEQ ID NO: 2227
  Description of Artificial Sequence: Synthetic whey; inner sequence and 3'  sequence

SEQ ID NO: 46248 - DNA, 53 bp, Artificial Sequence; identical to SEQ ID NO: 30782
  Description of Artificial Sequence: Synthetic whey; inner sequence and 3'  sequence

SEQ ID NO: 46249 - DNA, 53 bp, Artificial Sequence
  Description of Artificial Sequence: Synthetic whey; inner sequence and 3'  sequence
acgtcacgcaaggaacgttacgcatgcgcgttgactagtacatgaccacttga

SEQ ID NO: 46250 - DNA, 53 bp, Artificial Sequence; identical to SEQ ID NO: 2486
  Description of Artificial Sequence: Synthetic whey; inner sequence and 3'  sequence

SEQ ID NO: 46251 - DNA, 53 bp, Artificial Sequence
  Description of Artificial Sequence: Synthetic whey; inner sequence and 3'  sequence
gtccctgtgcctgaccgtcaagttgcggcattgactagtacatgaccacttga

SEQ ID NO: 46252 - DNA, 53 bp, Artificial Sequence; identical to SEQ ID NO: 10627
  Description of Artificial Sequence: Synthetic whey; inner sequence and 3'  sequence

SEQ ID NO: 46253 - DNA, 53 bp, Artificial Sequence; identical to SEQ ID NO: 10810
  Description of Artificial Sequence: Synthetic whey; inner sequence and 3'  sequence

SEQ ID NO: 46254 - DNA, 53 bp, Artificial Sequence; identical to SEQ ID NO: 30221
  Description of Artificial Sequence: Synthetic whey; inner sequence and 3'  sequence

SEQ ID NO: 46255 - DNA, 53 bp, Artificial Sequence; identical to SEQ ID NO: 2244
  Description of Artificial Sequence: Synthetic whey; inner sequence and 3'  sequence

SEQ ID NO: 46256 - DNA, 53 bp, Artificial Sequence
  Description of Artificial Sequence: Synthetic whey; inner sequence and 3'  sequence
gtaactgtgcctgaccgtcaagttgcggcattgactagtacatgaccacttga

SEQ ID NO: 46257 - DNA, 53 bp, Artificial Sequence; identical to SEQ ID NO: 2219
  Description of Artificial Sequence: Synthetic whey; inner sequence and 3'  sequence

SEQ ID NO: 46258 - DNA, 53 bp, Artificial Sequence; identical to SEQ ID NO: 22478
  Description of Artificial Sequence: Synthetic whey; inner sequence and 3'  sequence

SEQ ID NO: 46259 - DNA, 53 bp, Artificial Sequence
  Description of Artificial Sequence: Synthetic whey; inner sequence and 3'  sequence
cgtccgaatcgtaccgtgcatgtgcgttgtttgactagtacatgaccacttga

SEQ ID NO: 46260 - DNA, 53 bp, Artificial Sequence; identical to SEQ ID NO: 14853
  Description of Artificial Sequence: Synthetic whey; inner sequence and 3'  sequence

SEQ ID NO: 46261 - DNA, 53 bp, Artificial Sequence; identical to SEQ ID NO: 22944
  Description of Artificial Sequence: Synthetic whey; inner sequence and 3'  sequence

SEQ ID NO: 46262 - DNA, 53 bp, Artificial Sequence; identical to SEQ ID NO: 2383
  Description of Artificial Sequence: Synthetic whey; inner sequence and 3'  sequence

SEQ ID NO: 46263 - DNA, 53 bp, Artificial Sequence; identical to SEQ ID NO: 2685
  Description of Artificial Sequence: Synthetic whey; inner sequence and 3'  sequence

SEQ ID NO: 46264 - DNA, 53 bp, Artificial Sequence; identical to SEQ ID NO: 2632
  Description of Artificial Sequence: Synthetic whey; inner sequence and 3'  sequence

SEQ ID NO: 46265 - DNA, 53 bp, Artificial Sequence; identical to SEQ ID NO: 10910
  Description of Artificial Sequence: Synthetic whey; inner sequence and 3'  sequence

SEQ ID NO: 46266 - DNA, 53 bp, Artificial Sequence; identical to SEQ ID NO: 2059
  Description of Artificial Sequence: Synthetic whey; inner sequence and 3'  sequence

SEQ ID NO: 46267 - DNA, 53 bp, Artificial Sequence; identical to SEQ ID NO: 30971
  Description of Artificial Sequence: Synthetic whey; inner sequence and 3'  sequence

SEQ ID NO: 46268 - DNA, 53 bp, Artificial Sequence; identical to SEQ ID NO: 2492
  Description of Artificial Sequence: Synthetic whey; inner sequence and 3'  sequence

SEQ ID NO: 46269 - DNA, 53 bp, Artificial Sequence; identical to SEQ ID NO: 18585
  Description of Artificial Sequence: Synthetic whey; inner sequence and 3'  sequence

SEQ ID NO: 46270 - DNA, 53 bp, Artificial Sequence; identical to SEQ ID NO: 2195
  Description of Artificial Sequence: Synthetic whey; inner sequence and 3'  sequence

SEQ ID NO: 46271 - DNA, 48 bp, Artificial Sequence; identical to SEQ ID NO: 18927
  Description of Artificial Sequence: Synthetic whey; inner sequence and 3'  sequence

SEQ ID NO: 46272 - DNA, 53 bp, Artificial Sequence; identical to SEQ ID NO: 2190
  Description of Artificial Sequence: Synthetic whey; inner sequence and 3'  sequence

SEQ ID NO: 46273 - DNA, 53 bp, Artificial Sequence; identical to SEQ ID NO: 2069
  Description of Artificial Sequence: Synthetic whey; inner sequence and 3'  sequence

SEQ ID NO: 46274 - DNA, 53 bp, Artificial Sequence; identical to SEQ ID NO: 2141
  Description of Artificial Sequence: Synthetic whey; inner sequence and 3'  sequence

SEQ ID NO: 46275 - DNA, 53 bp, Artificial Sequence; identical to SEQ ID NO: 2169
  Description of Artificial Sequence: Synthetic whey; inner sequence and 3'  sequence

SEQ ID NO: 46276 - DNA, 53 bp, Artificial Sequence; identical to SEQ ID NO: 2177
  Description of Artificial Sequence: Synthetic whey; inner sequence and 3'  sequence

SEQ ID NO: 46277 - DNA, 53 bp, Artificial Sequence; identical to SEQ ID NO: 2082
  Description of Artificial Sequence: Synthetic whey; inner sequence and 3'  sequence

SEQ ID NO: 46278 - DNA, 53 bp, Artificial Sequence
  Description of Artificial Sequence: Synthetic whey; inner sequence and 3'  sequence
gtcattccatcccttcgagtgtgacaggtattgactagtacatgaccacttga

SEQ ID NO: 46279 - DNA, 53 bp, Artificial Sequence; identical to SEQ ID NO: 10928
  Description of Artificial Sequence: Synthetic whey; inner sequence and 3'  sequence

SEQ ID NO: 46280 - DNA, 52 bp, Artificial Sequence; identical to SEQ ID NO: 2873
  Description of Artificial Sequence: Synthetic whey; inner sequence and 3'  sequence

SEQ ID NO: 46281 - DNA, 53 bp, Artificial Sequence; identical to SEQ ID NO: 18769
  Description of Artificial Sequence: Synthetic whey; inner sequence and 3'  sequence

SEQ ID NO: 46282 - DNA, 53 bp, Artificial Sequence; identical to SEQ ID NO: 2149
  Description of Artificial Sequence: Synthetic whey; inner sequence and 3'  sequence

SEQ ID NO: 46283 - DNA, 53 bp, Artificial Sequence
  Description of Artificial Sequence: Synthetic whey; inner sequence and 3'  sequence
gtacgcctcgtcccgtcatgtggttccgtattgactagtacatgaccacttga

SEQ ID NO: 46284 - DNA, 53 bp, Artificial Sequence; identical to SEQ ID NO: 2205
  Description of Artificial Sequence: Synthetic whey; inner sequence and 3'  sequence

SEQ ID NO: 46285 - DNA, 53 bp, Artificial Sequence; identical to SEQ ID NO: 2955
  Description of Artificial Sequence: Synthetic whey; inner sequence and 3'  sequence

SEQ ID NO: 46286 - DNA, 53 bp, Artificial Sequence; identical to SEQ ID NO: 2644
  Description of Artificial Sequence: Synthetic whey; inner sequence and 3'  sequence

SEQ ID NO: 46287 - DNA, 53 bp, Artificial Sequence
  Description of Artificial Sequence: Synthetic whey; inner sequence and 3'  sequence
ggacgcaacgcaccgtatcgtggccatgtattgactagtacatgaccacttga

SEQ ID NO: 46288 - DNA, 53 bp, Artificial Sequence; identical to SEQ ID NO: 2096
  Description of Artificial Sequence: Synthetic whey; inner sequence and 3'  sequence

SEQ ID NO: 46289 - DNA, 53 bp, Artificial Sequence; identical to SEQ ID NO: 22473
  Description of Artificial Sequence: Synthetic whey; inner sequence and 3'  sequence

SEQ ID NO: 46290 - DNA, 53 bp, Artificial Sequence; identical to SEQ ID NO: 2821
  Description of Artificial Sequence: Synthetic whey; inner sequence and 3'  sequence

SEQ ID NO: 46291 - DNA, 53 bp, Artificial Sequence; identical to SEQ ID NO: 30839
  Description of Artificial Sequence: Synthetic whey; inner sequence and 3'  sequence

SEQ ID NO: 46292 - DNA, 53 bp, Artificial Sequence; identical to SEQ ID NO: 2397
  Description of Artificial Sequence: Synthetic whey; inner sequence and 3'  sequence

SEQ ID NO: 46293 - DNA, 53 bp, Artificial Sequence
  Description of Artificial Sequence: Synthetic whey; inner sequence and 3'  sequence
tgacgcaacgtaccgtatcgtggccatgtgttgactagtacatgaccacttga

SEQ ID NO: 46294 - DNA, 52 bp, Artificial Sequence; identical to SEQ ID NO: 2975
  Description of Artificial Sequence: Synthetic whey; inner sequence and 3'  sequence

SEQ ID NO: 46295 - DNA, 53 bp, Artificial Sequence; identical to SEQ ID NO: 2048
  Description of Artificial Sequence: Synthetic whey; inner sequence and 3'  sequence

SEQ ID NO: 46296 - DNA, 53 bp, Artificial Sequence; identical to SEQ ID NO: 2470
  Description of Artificial Sequence: Synthetic whey; inner sequence and 3'  sequence

SEQ ID NO: 46297 - DNA, 53 bp, Artificial Sequence
  Description of Artificial Sequence: Synthetic whey; inner sequence and 3'  sequence
gtcactgtgcctcaccgtcaagttgcggcattgactagtacatgaccacttga

SEQ ID NO: 46298 - DNA, 53 bp, Artificial Sequence; identical to SEQ ID NO: 2366
  Description of Artificial Sequence: Synthetic whey; inner sequence and 3'  sequence

SEQ ID NO: 46299 - DNA, 53 bp, Artificial Sequence; identical to SEQ ID NO: 2901
  Description of Artificial Sequence: Synthetic whey; inner sequence and 3'  sequence

SEQ ID NO: 46300 - DNA, 52 bp, Artificial Sequence; identical to SEQ ID NO: 30237
  Description of Artificial Sequence: Synthetic whey; inner sequence and 3'  sequence

SEQ ID NO: 46301 - DNA, 53 bp, Artificial Sequence
  Description of Artificial Sequence: Synthetic whey; inner sequence and 3'  sequence
agcgcaacatcgtaacgtgccatcgtcgtgttgactagtacatgaccacttga

SEQ ID NO: 46302 - DNA, 53 bp, Artificial Sequence; identical to SEQ ID NO: 22879
  Description of Artificial Sequence: Synthetic whey; inner sequence and 3'  sequence

SEQ ID NO: 46303 - DNA, 53 bp, Artificial Sequence; identical to SEQ ID NO: 30993
  Description of Artificial Sequence: Synthetic whey; inner sequence and 3'  sequence

SEQ ID NO: 46304 - DNA, 53 bp, Artificial Sequence; identical to SEQ ID NO: 30921
  Description of Artificial Sequence: Synthetic whey; inner sequence and 3'  sequence

SEQ ID NO: 46305 - DNA, 53 bp, Artificial Sequence
  Description of Artificial Sequence: Synthetic whey; inner sequence and 3'  sequence
ggacgcaacgtaccttatcgtggccatgtattgactagtacatgaccacttga

SEQ ID NO: 46306 - DNA, 53 bp, Artificial Sequence; identical to SEQ ID NO: 6638
  Description of Artificial Sequence: Synthetic whey; inner sequence and 3'  sequence

SEQ ID NO: 46307 - DNA, 53 bp, Artificial Sequence; identical to SEQ ID NO: 30808
  Description of Artificial Sequence: Synthetic whey; inner sequence and 3'  sequence

SEQ ID NO: 46308 - DNA, 53 bp, Artificial Sequence; identical to SEQ ID NO: 42829
  Description of Artificial Sequence: Synthetic whey; inner sequence and 3'  sequence

SEQ ID NO: 46309 - DNA, 53 bp, Artificial Sequence; identical to SEQ ID NO: 6938
  Description of Artificial Sequence: Synthetic whey; inner sequence and 3'  sequence

SEQ ID NO: 46310 - DNA, 53 bp, Artificial Sequence; identical to SEQ ID NO: 6521
  Description of Artificial Sequence: Synthetic whey; inner sequence and 3'  sequence

SEQ ID NO: 46311 - DNA, 53 bp, Artificial Sequence; identical to SEQ ID NO: 22708
  Description of Artificial Sequence: Synthetic whey; inner sequence and 3'  sequence

SEQ ID NO: 46312 - DNA, 53 bp, Artificial Sequence
  Description of Artificial Sequence: Synthetic whey; inner sequence and 3'  sequence
acgtgtcagcgtaacgtgcatgctgttgccttgactagtacatgaccacttga

SEQ ID NO: 46313 - DNA, 53 bp, Artificial Sequence; identical to SEQ ID NO: 22623
  Description of Artificial Sequence: Synthetic whey; inner sequence and 3'  sequence

SEQ ID NO: 46314 - DNA, 53 bp, Artificial Sequence
  Description of Artificial Sequence: Synthetic whey; inner sequence and 3'  sequence
gccactgtgcctgaccgtcaagttgcggcattgactagtacatgaccacttga

SEQ ID NO: 46315 - DNA, 53 bp, Artificial Sequence; identical to SEQ ID NO: 2185
  Description of Artificial Sequence: Synthetic whey; inner sequence and 3'  sequence

SEQ ID NO: 46316 - DNA, 51 bp, Artificial Sequence; identical to SEQ ID NO: 2148
  Description of Artificial Sequence: Synthetic whey; inner sequence and 3'  sequence

SEQ ID NO: 46317 - DNA, 53 bp, Artificial Sequence; identical to SEQ ID NO: 2619
  Description of Artificial Sequence: Synthetic whey; inner sequence and 3'  sequence

SEQ ID NO: 46318 - DNA, 53 bp, Artificial Sequence
  Description of Artificial Sequence: Synthetic whey; inner sequence and 3'  sequence
cgatgcgcatcgagcacacgtccgtacgcgttgactagtacatgaccacttga

SEQ ID NO: 46319 - DNA, 53 bp, Artificial Sequence; identical to SEQ ID NO: 2054
  Description of Artificial Sequence: Synthetic whey; inner sequence and 3'  sequence

SEQ ID NO: 46320 - DNA, 53 bp, Artificial Sequence; identical to SEQ ID NO: 2386
  Description of Artificial Sequence: Synthetic whey; inner sequence and 3'  sequence

SEQ ID NO: 46321 - DNA, 53 bp, Artificial Sequence
  Description of Artificial Sequence: Synthetic whey; inner sequence and 3'  sequence
ggacgcaacgtaacgttcgagtggtacgtattgactagtacatgaccacttga

SEQ ID NO: 46322 - DNA, 53 bp, Artificial Sequence; identical to SEQ ID NO: 22983
  Description of Artificial Sequence: Synthetic whey; inner sequence and 3'  sequence

SEQ ID NO: 46323 - DNA, 53 bp, Artificial Sequence; identical to SEQ ID NO: 30382
  Description of Artificial Sequence: Synthetic whey; inner sequence and 3'  sequence

SEQ ID NO: 46324 - DNA, 53 bp, Artificial Sequence; identical to SEQ ID NO: 2267
  Description of Artificial Sequence: Synthetic whey; inner sequence and 3'  sequence

SEQ ID NO: 46325 - DNA, 53 bp, Artificial Sequence; identical to SEQ ID NO: 18837
  Description of Artificial Sequence: Synthetic whey; inner sequence and 3'  sequence

SEQ ID NO: 46326 - DNA, 53 bp, Artificial Sequence; identical to SEQ ID NO: 6289
  Description of Artificial Sequence: Synthetic whey; inner sequence and 3'  sequence

SEQ ID NO: 46327 - DNA, 53 bp, Artificial Sequence; identical to SEQ ID NO: 22836
  Description of Artificial Sequence: Synthetic whey; inner sequence and 3'  sequence

SEQ ID NO: 46328 - DNA, 52 bp, Artificial Sequence; identical to SEQ ID NO: 2070
  Description of Artificial Sequence: Synthetic whey; inner sequence and 3'  sequence

SEQ ID NO: 46329 - DNA, 53 bp, Artificial Sequence; identical to SEQ ID NO: 6272
  Description of Artificial Sequence: Synthetic whey; inner sequence and 3'  sequence

SEQ ID NO: 46330 - DNA, 53 bp, Artificial Sequence; identical to SEQ ID NO: 2860
  Description of Artificial Sequence: Synthetic whey; inner sequence and 3'  sequence

SEQ ID NO: 46331 - DNA, 53 bp, Artificial Sequence; identical to SEQ ID NO: 22769
  Description of Artificial Sequence: Synthetic whey; inner sequence and 3'  sequence

SEQ ID NO: 46332 - DNA, 53 bp, Artificial Sequence; identical to SEQ ID NO: 6933
  Description of Artificial Sequence: Synthetic whey; inner sequence and 3'  sequence

SEQ ID NO: 46333 - DNA, 53 bp, Artificial Sequence; identical to SEQ ID NO: 2142
  Description of Artificial Sequence: Synthetic whey; inner sequence and 3'  sequence

SEQ ID NO: 46334 - DNA, 53 bp, Artificial Sequence; identical to SEQ ID NO: 30591
  Description of Artificial Sequence: Synthetic whey; inner sequence and 3'  sequence

SEQ ID NO: 46335 - DNA, 53 bp, Artificial Sequence; identical to SEQ ID NO: 30693
  Description of Artificial Sequence: Synthetic whey; inner sequence and 3'  sequence

SEQ ID NO: 46336 - DNA, 53 bp, Artificial Sequence; identical to SEQ ID NO: 2057
  Description of Artificial Sequence: Synthetic whey; inner sequence and 3'  sequence

SEQ ID NO: 46337 - DNA, 53 bp, Artificial Sequence; identical to SEQ ID NO: 2742
  Description of Artificial Sequence: Synthetic whey; inner sequence and 3'  sequence

SEQ ID NO: 46338 - DNA, 53 bp, Artificial Sequence; identical to SEQ ID NO: 10579
  Description of Artificial Sequence: Synthetic whey; inner sequence and 3'  sequence

SEQ ID NO: 46339 - DNA, 51 bp, Artificial Sequence; identical to SEQ ID NO: 22328
  Description of Artificial Sequence: Synthetic whey; inner sequence and 3'  sequence

SEQ ID NO: 46340 - DNA, 53 bp, Artificial Sequence; identical to SEQ ID NO: 18389
  Description of Artificial Sequence: Synthetic whey; inner sequence and 3'  sequence

SEQ ID NO: 46341 - DNA, 53 bp, Artificial Sequence; identical to SEQ ID NO: 2274
  Description of Artificial Sequence: Synthetic whey; inner sequence and 3'  sequence

SEQ ID NO: 46342 - DNA, 53 bp, Artificial Sequence; identical to SEQ ID NO: 30674
  Description of Artificial Sequence: Synthetic whey; inner sequence and 3'  sequence

SEQ ID NO: 46343 - DNA, 53 bp, Artificial Sequence; identical to SEQ ID NO: 6543
  Description of Artificial Sequence: Synthetic whey; inner sequence and 3'  sequence

SEQ ID NO: 46344 - DNA, 53 bp, Artificial Sequence
  Description of Artificial Sequence: Synthetic whey; inner sequence and 3'  sequence
catgccacgtgatgctgtcattccgtcacgttgactagtacatgaccacttga

SEQ ID NO: 46345 - DNA, 53 bp, Artificial Sequence
  Description of Artificial Sequence: Synthetic whey; inner sequence and 3'  sequence
ggacgccacgtaccgtatcgtggccatgtgttgactagtacatgaccacttga

SEQ ID NO: 46346 - DNA, 53 bp, Artificial Sequence; identical to SEQ ID NO: 6419
  Description of Artificial Sequence: Synthetic whey; inner sequence and 3'  sequence

SEQ ID NO: 46347 - DNA, 53 bp, Artificial Sequence; identical to SEQ ID NO: 22496
  Description of Artificial Sequence: Synthetic whey; inner sequence and 3'  sequence

SEQ ID NO: 46348 - DNA, 53 bp, Artificial Sequence
  Description of Artificial Sequence: Synthetic whey; inner sequence and 3'  sequence
acgttgcgcagtacgtgtggacgtgatgcattgactagtacatgaccacttga

SEQ ID NO: 46349 - DNA, 53 bp, Artificial Sequence; identical to SEQ ID NO: 2647
  Description of Artificial Sequence: Synthetic whey; inner sequence and 3'  sequence

SEQ ID NO: 46350 - DNA, 53 bp, Artificial Sequence; identical to SEQ ID NO: 2787
  Description of Artificial Sequence: Synthetic whey; inner sequence and 3'  sequence

SEQ ID NO: 46351 - DNA, 53 bp, Artificial Sequence
  Description of Artificial Sequence: Synthetic whey; inner sequence and 3'  sequence
ccatctcgtcactatcatgtgtgtcacgtattgactagtacatgaccacttga

SEQ ID NO: 46352 - DNA, 53 bp, Artificial Sequence; identical to SEQ ID NO: 2289
  Description of Artificial Sequence: Synthetic whey; inner sequence and 3'  sequence

SEQ ID NO: 46353 - DNA, 53 bp, Artificial Sequence; identical to SEQ ID NO: 30747
  Description of Artificial Sequence: Synthetic whey; inner sequence and 3'  sequence

SEQ ID NO: 46354 - DNA, 53 bp, Artificial Sequence; identical to SEQ ID NO: 23001
  Description of Artificial Sequence: Synthetic whey; inner sequence and 3'  sequence

SEQ ID NO: 46355 - DNA, 53 bp, Artificial Sequence; identical to SEQ ID NO: 22458
  Description of Artificial Sequence: Synthetic whey; inner sequence and 3'  sequence

SEQ ID NO: 46356 - DNA, 53 bp, Artificial Sequence; identical to SEQ ID NO: 2294
  Description of Artificial Sequence: Synthetic whey; inner sequence and 3'  sequence

SEQ ID NO: 46357 - DNA, 53 bp, Artificial Sequence; identical to SEQ ID NO: 10964
  Description of Artificial Sequence: Synthetic whey; inner sequence and 3'  sequence

SEQ ID NO: 46358 - DNA, 53 bp, Artificial Sequence; identical to SEQ ID NO: 22730
  Description of Artificial Sequence: Synthetic whey; inner sequence and 3'  sequence

SEQ ID NO: 46359 - DNA, 53 bp, Artificial Sequence; identical to SEQ ID NO: 6603
  Description of Artificial Sequence: Synthetic whey; inner sequence and 3'  sequence

SEQ ID NO: 46360 - DNA, 53 bp, Artificial Sequence; identical to SEQ ID NO: 6429
  Description of Artificial Sequence: Synthetic whey; inner sequence and 3'  sequence

SEQ ID NO: 46361 - DNA, 53 bp, Artificial Sequence; identical to SEQ ID NO: 2857
  Description of Artificial Sequence: Synthetic whey; inner sequence and 3'  sequence

SEQ ID NO: 46362 - DNA, 53 bp, Artificial Sequence; identical to SEQ ID NO: 14892
  Description of Artificial Sequence: Synthetic whey; inner sequence and 3'  sequence

SEQ ID NO: 46363 - DNA, 53 bp, Artificial Sequence; identical to SEQ ID NO: 2789
  Description of Artificial Sequence: Synthetic whey; inner sequence and 3'  sequence

SEQ ID NO: 46364 - DNA, 53 bp, Artificial Sequence; identical to SEQ ID NO: 6627
  Description of Artificial Sequence: Synthetic whey; inner sequence and 3'  sequence

SEQ ID NO: 46365 - DNA, 53 bp, Artificial Sequence; identical to SEQ ID NO: 2074
  Description of Artificial Sequence: Synthetic whey; inner sequence and 3'  sequence

SEQ ID NO: 46366 - DNA, 53 bp, Artificial Sequence; identical to SEQ ID NO: 2186
  Description of Artificial Sequence: Synthetic whey; inner sequence and 3'  sequence

SEQ ID NO: 46367 - DNA, 53 bp, Artificial Sequence
  Description of Artificial Sequence: Synthetic whey; inner sequence and 3'  sequence
gtcactgtgcctgaccgtcaagtttcggcattgactagtacatgaccacttga

SEQ ID NO: 46368 - DNA, 53 bp, Artificial Sequence; identical to SEQ ID NO: 2183
  Description of Artificial Sequence: Synthetic whey; inner sequence and 3'  sequence

SEQ ID NO: 46369 - DNA, 53 bp, Artificial Sequence; identical to SEQ ID NO: 34619
  Description of Artificial Sequence: Synthetic whey; inner sequence and 3'  sequence

SEQ ID NO: 46370 - DNA, 53 bp, Artificial Sequence
  Description of Artificial Sequence: Synthetic whey; inner sequence and 3'  sequence
gtcactgttcctgaccgtcaagttgcggcattgactagtacatgaccacttga

SEQ ID NO: 46371 - DNA, 53 bp, Artificial Sequence; identical to SEQ ID NO: 30957
  Description of Artificial Sequence: Synthetic whey; inner sequence and 3'  sequence

SEQ ID NO: 46372 - DNA, 53 bp, Artificial Sequence
  Description of Artificial Sequence: Synthetic whey; inner sequence and 3'  sequence
catggcaacgtgatgcgtgtgacctgcacattgactagtacatgaccacttga

SEQ ID NO: 46373 - DNA, 53 bp, Artificial Sequence; identical to SEQ ID NO: 30869
  Description of Artificial Sequence: Synthetic whey; inner sequence and 3'  sequence

SEQ ID NO: 46374 - DNA, 53 bp, Artificial Sequence; identical to SEQ ID NO: 6890
  Description of Artificial Sequence: Synthetic whey; inner sequence and 3'  sequence

SEQ ID NO: 46375 - DNA, 53 bp, Artificial Sequence; identical to SEQ ID NO: 6743
  Description of Artificial Sequence: Synthetic whey; inner sequence and 3'  sequence

SEQ ID NO: 46376 - DNA, 53 bp, Artificial Sequence; identical to SEQ ID NO: 2521
  Description of Artificial Sequence: Synthetic whey; inner sequence and 3'  sequence

SEQ ID NO: 46377 - DNA, 53 bp, Artificial Sequence; identical to SEQ ID NO: 30720
  Description of Artificial Sequence: Synthetic whey; inner sequence and 3'  sequence

SEQ ID NO: 46378 - DNA, 53 bp, Artificial Sequence; identical to SEQ ID NO: 22811
  Description of Artificial Sequence: Synthetic whey; inner sequence and 3'  sequence

SEQ ID NO: 46379 - DNA, 53 bp, Artificial Sequence
  Description of Artificial Sequence: Synthetic whey; inner sequence and 3'  sequence
cgatgcacacgatgatgcacgtccttcggcttgactagtacatgaccacttga

SEQ ID NO: 46380 - DNA, 53 bp, Artificial Sequence; identical to SEQ ID NO: 2203
  Description of Artificial Sequence: Synthetic whey; inner sequence and 3'  sequence

SEQ ID NO: 46381 - DNA, 48 bp, Artificial Sequence; identical to SEQ ID NO: 22741
  Description of Artificial Sequence: Synthetic whey; inner sequence and 3'  sequence

SEQ ID NO: 46382 - DNA, 53 bp, Artificial Sequence; identical to SEQ ID NO: 2805
  Description of Artificial Sequence: Synthetic whey; inner sequence and 3'  sequence

SEQ ID NO: 46383 - DNA, 53 bp, Artificial Sequence; identical to SEQ ID NO: 2447
  Description of Artificial Sequence: Synthetic whey; inner sequence and 3'  sequence

SEQ ID NO: 46384 - DNA, 53 bp, Artificial Sequence; identical to SEQ ID NO: 30416
  Description of Artificial Sequence: Synthetic whey; inner sequence and 3'  sequence

SEQ ID NO: 46385 - DNA, 53 bp, Artificial Sequence
  Description of Artificial Sequence: Synthetic whey; inner sequence and 3'  sequence
cacgacgtgacgtatcgctacatgcacacgttgactagtacatgaccacttga

SEQ ID NO: 46386 - DNA, 53 bp, Artificial Sequence; identical to SEQ ID NO: 6787
  Description of Artificial Sequence: Synthetic whey; inner sequence and 3'  sequence

SEQ ID NO: 46387 - DNA, 53 bp, Artificial Sequence; identical to SEQ ID NO: 14958
  Description of Artificial Sequence: Synthetic whey; inner sequence and 3'  sequence

SEQ ID NO: 46388 - DNA, 53 bp, Artificial Sequence
  Description of Artificial Sequence: Synthetic whey; inner sequence and 3'  sequence
cgatgcagatcgatgtcgttacgctgcacgttgactagtacatgaccacttga

SEQ ID NO: 46389 - DNA, 53 bp, Artificial Sequence
  Description of Artificial Sequence: Synthetic whey; inner sequence and 3'  sequence
gtcactgtgcctgaccgtcaagttgaggcattgactagtacatgaccacttga

SEQ ID NO: 46390 - DNA, 53 bp, Artificial Sequence; identical to SEQ ID NO: 2326
  Description of Artificial Sequence: Synthetic whey; inner sequence and 3'  sequence

SEQ ID NO: 46391 - DNA, 53 bp, Artificial Sequence
  Description of Artificial Sequence: Synthetic whey; inner sequence and 3'  sequence
ggccgcaacgtaccgtatcgtggccatgtattgactagtacatgaccacttga

SEQ ID NO: 46392 - DNA, 53 bp, Artificial Sequence; identical to SEQ ID NO: 30316
  Description of Artificial Sequence: Synthetic whey; inner sequence and 3'  sequence

SEQ ID NO: 46393 - DNA, 53 bp, Artificial Sequence; identical to SEQ ID NO: 6653
  Description of Artificial Sequence: Synthetic whey; inner sequence and 3'  sequence

SEQ ID NO: 46394 - DNA, 53 bp, Artificial Sequence; identical to SEQ ID NO: 22696
  Description of Artificial Sequence: Synthetic whey; inner sequence and 3'  sequence

SEQ ID NO: 46395 - DNA, 53 bp, Artificial Sequence; identical to SEQ ID NO: 2634
  Description of Artificial Sequence: Synthetic whey; inner sequence and 3'  sequence

SEQ ID NO: 46396 - DNA, 53 bp, Artificial Sequence; identical to SEQ ID NO: 22722
  Description of Artificial Sequence: Synthetic whey; inner sequence and 3'  sequence

SEQ ID NO: 46397 - DNA, 53 bp, Artificial Sequence; identical to SEQ ID NO: 2706
  Description of Artificial Sequence: Synthetic whey; inner sequence and 3'  sequence

SEQ ID NO: 46398 - DNA, 53 bp, Artificial Sequence; identical to SEQ ID NO: 6955
  Description of Artificial Sequence: Synthetic whey; inner sequence and 3'  sequence

SEQ ID NO: 46399 - DNA, 53 bp, Artificial Sequence
  Description of Artificial Sequence: Synthetic whey; inner sequence and 3'  sequence
gtcatgccctcccttcgagtgtgacaggtattgactagtacatgaccacttga

SEQ ID NO: 46400 - DNA, 53 bp, Artificial Sequence; identical to SEQ ID NO: 30329
  Description of Artificial Sequence: Synthetic whey; inner sequence and 3'  sequence

SEQ ID NO: 46401 - DNA, 53 bp, Artificial Sequence; identical to SEQ ID NO: 2351
  Description of Artificial Sequence: Synthetic whey; inner sequence and 3'  sequence

SEQ ID NO: 46402 - DNA, 53 bp, Artificial Sequence
  Description of Artificial Sequence: Synthetic whey; inner sequence and 3'  sequence
gtactcatcgtcccgtcatgtggttccgtattgactagtacatgaccacttga

SEQ ID NO: 46403 - DNA, 53 bp, Artificial Sequence; identical to SEQ ID NO: 10872
  Description of Artificial Sequence: Synthetic whey; inner sequence and 3'  sequence

SEQ ID NO: 46404 - DNA, 53 bp, Artificial Sequence; identical to SEQ ID NO: 2132
  Description of Artificial Sequence: Synthetic whey; inner sequence and 3'  sequence

SEQ ID NO: 46405 - DNA, 53 bp, Artificial Sequence; identical to SEQ ID NO: 22662
  Description of Artificial Sequence: Synthetic whey; inner sequence and 3'  sequence

SEQ ID NO: 46406 - DNA, 53 bp, Artificial Sequence
  Description of Artificial Sequence: Synthetic whey; inner sequence and 3'  sequence
gtaatgccatcccttcgagtgtgacaggtattgactagtacatgaccacttga

SEQ ID NO: 46407 - DNA, 53 bp, Artificial Sequence; identical to SEQ ID NO: 30884
  Description of Artificial Sequence: Synthetic whey; inner sequence and 3'  sequence

SEQ ID NO: 46408 - DNA, 53 bp, Artificial Sequence; identical to SEQ ID NO: 6621
  Description of Artificial Sequence: Synthetic whey; inner sequence and 3'  sequence

SEQ ID NO: 46409 - DNA, 53 bp, Artificial Sequence; identical to SEQ ID NO: 2056
  Description of Artificial Sequence: Synthetic whey; inner sequence and 3'  sequence

SEQ ID NO: 46410 - DNA, 53 bp, Artificial Sequence; identical to SEQ ID NO: 6748
  Description of Artificial Sequence: Synthetic whey; inner sequence and 3'  sequence

SEQ ID NO: 46411 - DNA, 53 bp, Artificial Sequence; identical to SEQ ID NO: 18906
  Description of Artificial Sequence: Synthetic whey; inner sequence and 3'  sequence

SEQ ID NO: 46412 - DNA, 53 bp, Artificial Sequence
  Description of Artificial Sequence: Synthetic whey; inner sequence and 3'  sequence
gtacgcaacgtaccgtatcgtggccatgtattgactagtacatgaccacttga

SEQ ID NO: 46413 - DNA, 53 bp, Artificial Sequence; identical to SEQ ID NO: 2256
  Description of Artificial Sequence: Synthetic whey; inner sequence and 3'  sequence

SEQ ID NO: 46414 - DNA, 53 bp, Artificial Sequence; identical to SEQ ID NO: 2591
  Description of Artificial Sequence: Synthetic whey; inner sequence and 3'  sequence

SEQ ID NO: 46415 - DNA, 53 bp, Artificial Sequence; identical to SEQ ID NO: 22613
  Description of Artificial Sequence: Synthetic whey; inner sequence and 3'  sequence

SEQ ID NO: 46416 - DNA, 53 bp, Artificial Sequence; identical to SEQ ID NO: 22752
  Description of Artificial Sequence: Synthetic whey; inner sequence and 3'  sequence

SEQ ID NO: 46417 - DNA, 53 bp, Artificial Sequence; identical to SEQ ID NO: 22530
  Description of Artificial Sequence: Synthetic whey; inner sequence and 3'  sequence

SEQ ID NO: 46418 - DNA, 53 bp, Artificial Sequence; identical to SEQ ID NO: 18698
  Description of Artificial Sequence: Synthetic whey; inner sequence and 3'  sequence

SEQ ID NO: 46419 - DNA, 53 bp, Artificial Sequence; identical to SEQ ID NO: 30909
  Description of Artificial Sequence: Synthetic whey; inner sequence and 3'  sequence

SEQ ID NO: 46420 - DNA, 53 bp, Artificial Sequence; identical to SEQ ID NO: 6469
  Description of Artificial Sequence: Synthetic whey; inner sequence and 3'  sequence

SEQ ID NO: 46421 - DNA, 53 bp, Artificial Sequence; identical to SEQ ID NO: 2114
  Description of Artificial Sequence: Synthetic whey; inner sequence and 3'  sequence

SEQ ID NO: 46422 - DNA, 53 bp, Artificial Sequence
  Description of Artificial Sequence: Synthetic whey; inner sequence and 3'  sequence
gtcactgtgcctgatcgtcaagttgcggcattgactagtacatgaccacttga

SEQ ID NO: 46423 - DNA, 53 bp, Artificial Sequence; identical to SEQ ID NO: 2160
  Description of Artificial Sequence: Synthetic whey; inner sequence and 3'  sequence

SEQ ID NO: 46424 - DNA, 53 bp, Artificial Sequence; identical to SEQ ID NO: 6987
  Description of Artificial Sequence: Synthetic whey; inner sequence and 3'  sequence

SEQ ID NO: 46425 - DNA, 53 bp, Artificial Sequence
  Description of Artificial Sequence: Synthetic whey; inner sequence and 3'  sequence
acgtgcaacgtcacgtgctgcgtcgtcaccttgactagtacatgaccacttga

SEQ ID NO: 46426 - DNA, 53 bp, Artificial Sequence
  Description of Artificial Sequence: Synthetic whey; inner sequence and 3'  sequence
cgtgacacgcgagccatgcgtacgtacgcgttgactagtacatgaccacttga

SEQ ID NO: 46427 - DNA, 53 bp, Artificial Sequence; identical to SEQ ID NO: 2255
  Description of Artificial Sequence: Synthetic whey; inner sequence and 3'  sequence

SEQ ID NO: 46428 - DNA, 53 bp, Artificial Sequence; identical to SEQ ID NO: 6620
  Description of Artificial Sequence: Synthetic whey; inner sequence and 3'  sequence

SEQ ID NO: 46429 - DNA, 53 bp, Artificial Sequence; identical to SEQ ID NO: 6579
  Description of Artificial Sequence: Synthetic whey; inner sequence and 3'  sequence

SEQ ID NO: 46430 - DNA, 53 bp, Artificial Sequence
  Description of Artificial Sequence: Synthetic whey; inner sequence and 3'  sequence
gtacgcatcgccccgtcatgtggttccgtattgactagtacatgaccacttga

SEQ ID NO: 46431 - DNA, 53 bp, Artificial Sequence; identical to SEQ ID NO: 34384
  Description of Artificial Sequence: Synthetic whey; inner sequence and 3'  sequence

SEQ ID NO: 46432 - DNA, 53 bp, Artificial Sequence
  Description of Artificial Sequence: Synthetic whey; inner sequence and 3'  sequence
tggtcaacgcgcatacgtcacgattgcatgttgactagtacatgaccacttga

SEQ ID NO: 46433 - DNA, 53 bp, Artificial Sequence; identical to SEQ ID NO: 2246
  Description of Artificial Sequence: Synthetic whey; inner sequence and 3'  sequence

SEQ ID NO: 46434 - DNA, 53 bp, Artificial Sequence; identical to SEQ ID NO: 10985
  Description of Artificial Sequence: Synthetic whey; inner sequence and 3'  sequence

SEQ ID NO: 46435 - DNA, 52 bp, Artificial Sequence
  Description of Artificial Sequence: Synthetic whey; inner sequence and 3'  sequence
gtcattccgcatcctacacgtggtgcatgttgactagtacatgaccacttga

SEQ ID NO: 46436 - DNA, 53 bp, Artificial Sequence; identical to SEQ ID NO: 6988
  Description of Artificial Sequence: Synthetic whey; inner sequence and 3'  sequence

SEQ ID NO: 46437 - DNA, 53 bp, Artificial Sequence; identical to SEQ ID NO: 2519
  Description of Artificial Sequence: Synthetic whey; inner sequence and 3'  sequence

SEQ ID NO: 46438 - DNA, 53 bp, Artificial Sequence; identical to SEQ ID NO: 6485
  Description of Artificial Sequence: Synthetic whey; inner sequence and 3'  sequence

SEQ ID NO: 46439 - DNA, 53 bp, Artificial Sequence
  Description of Artificial Sequence: Synthetic whey; inner sequence and 3'  sequence
ggacgcaacgtaccgtatcgtggccctgtgttgactagtacatgaccacttga

SEQ ID NO: 46440 - DNA, 53 bp, Artificial Sequence; identical to SEQ ID NO: 30978
  Description of Artificial Sequence: Synthetic whey; inner sequence and 3'  sequence

SEQ ID NO: 46441 - DNA, 53 bp, Artificial Sequence; identical to SEQ ID NO: 30432
  Description of Artificial Sequence: Synthetic whey; inner sequence and 3'  sequence

SEQ ID NO: 46442 - DNA, 53 bp, Artificial Sequence; identical to SEQ ID NO: 2104
  Description of Artificial Sequence: Synthetic whey; inner sequence and 3'  sequence

SEQ ID NO: 46443 - DNA, 53 bp, Artificial Sequence; identical to SEQ ID NO: 18744
  Description of Artificial Sequence: Synthetic whey; inner sequence and 3'  sequence

SEQ ID NO: 46444 - DNA, 53 bp, Artificial Sequence
  Description of Artificial Sequence: Synthetic whey; inner sequence and 3'  sequence
gtcactgtgcctgaccgtcatgttgcggcattgactagtacatgaccacttga

SEQ ID NO: 46445 - DNA, 53 bp, Artificial Sequence; identical to SEQ ID NO: 14743
  Description of Artificial Sequence: Synthetic whey; inner sequence and 3'  sequence

SEQ ID NO: 46446 - DNA, 53 bp, Artificial Sequence
  Description of Artificial Sequence: Synthetic whey; inner sequence and 3'  sequence
cgtaccagtacgcaacacgtcatcgtcacgttgactagtacatgaccacttga

SEQ ID NO: 46447 - DNA, 53 bp, Artificial Sequence; identical to SEQ ID NO: 38514
  Description of Artificial Sequence: Synthetic whey; inner sequence and 3'  sequence

SEQ ID NO: 46448 - DNA, 53 bp, Artificial Sequence; identical to SEQ ID NO: 30960
  Description of Artificial Sequence: Synthetic whey; inner sequence and 3'  sequence

SEQ ID NO: 46449 - DNA, 53 bp, Artificial Sequence; identical to SEQ ID NO: 18664
  Description of Artificial Sequence: Synthetic whey; inner sequence and 3'  sequence

SEQ ID NO: 46450 - DNA, 53 bp, Artificial Sequence; identical to SEQ ID NO: 30751
  Description of Artificial Sequence: Synthetic whey; inner sequence and 3'  sequence

SEQ ID NO: 46451 - DNA, 53 bp, Artificial Sequence; identical to SEQ ID NO: 2367
  Description of Artificial Sequence: Synthetic whey; inner sequence and 3'  sequence

SEQ ID NO: 46452 - DNA, 55 bp, Artificial Sequence
  Description of Artificial Sequence: Synthetic whey; inner sequence and 3'  sequence
ggacgcaacgtaccgtatcgtggccatgcacattgactagtacatgaccacttga

SEQ ID NO: 46453 - DNA, 53 bp, Artificial Sequence; identical to SEQ ID NO: 22324
  Description of Artificial Sequence: Synthetic whey; inner sequence and 3'  sequence

SEQ ID NO: 46454 - DNA, 53 bp, Artificial Sequence
  Description of Artificial Sequence: Synthetic whey; inner sequence and 3'  sequence
gtcactgtgcctgaccgtcaagttgctgcattgactagtacatgaccacttga

SEQ ID NO: 46455 - DNA, 53 bp, Artificial Sequence; identical to SEQ ID NO: 22335
  Description of Artificial Sequence: Synthetic whey; inner sequence and 3'  sequence

SEQ ID NO: 46456 - DNA, 53 bp, Artificial Sequence; identical to SEQ ID NO: 6612
  Description of Artificial Sequence: Synthetic whey; inner sequence and 3'  sequence

SEQ ID NO: 46457 - DNA, 53 bp, Artificial Sequence; identical to SEQ ID NO: 2724
  Description of Artificial Sequence: Synthetic whey; inner sequence and 3'  sequence

SEQ ID NO: 46458 - DNA, 53 bp, Artificial Sequence; identical to SEQ ID NO: 2920
  Description of Artificial Sequence: Synthetic whey; inner sequence and 3'  sequence

SEQ ID NO: 46459 - DNA, 53 bp, Artificial Sequence; identical to SEQ ID NO: 2215
  Description of Artificial Sequence: Synthetic whey; inner sequence and 3'  sequence

SEQ ID NO: 46460 - DNA, 53 bp, Artificial Sequence; identical to SEQ ID NO: 30814
  Description of Artificial Sequence: Synthetic whey; inner sequence and 3'  sequence

SEQ ID NO: 46461 - DNA, 53 bp, Artificial Sequence
  Description of Artificial Sequence: Synthetic whey; inner sequence and 3'  sequence
cgtaccacacgttacggcatgtgcttcgcattgactagtacatgaccacttga

SEQ ID NO: 46462 - DNA, 53 bp, Artificial Sequence
  Description of Artificial Sequence: Synthetic whey; inner sequence and 3'  sequence
gtcatgccataccttcgagtgtgacaggtattgactagtacatgaccacttga

SEQ ID NO: 46463 - DNA, 53 bp, Artificial Sequence; identical to SEQ ID NO: 2152
  Description of Artificial Sequence: Synthetic whey; inner sequence and 3'  sequence

SEQ ID NO: 46464 - DNA, 53 bp, Artificial Sequence; identical to SEQ ID NO: 18985
  Description of Artificial Sequence: Synthetic whey; inner sequence and 3'  sequence

SEQ ID NO: 46465 - DNA, 53 bp, Artificial Sequence
  Description of Artificial Sequence: Synthetic whey; inner sequence and 3'  sequence
cgtaccgcacgtgacgtgtccgtgccgtgattgactagtacatgaccacttga

SEQ ID NO: 46466 - DNA, 53 bp, Artificial Sequence
  Description of Artificial Sequence: Synthetic whey; inner sequence and 3'  sequence
ttcatgccatcccttcgagtgtgacaggtattgactagtacatgaccacttga

SEQ ID NO: 46467 - DNA, 53 bp, Artificial Sequence; identical to SEQ ID NO: 22683
  Description of Artificial Sequence: Synthetic whey; inner sequence and 3'  sequence

SEQ ID NO: 46468 - DNA, 53 bp, Artificial Sequence; identical to SEQ ID NO: 6571
  Description of Artificial Sequence: Synthetic whey; inner sequence and 3'  sequence

SEQ ID NO: 46469 - DNA, 53 bp, Artificial Sequence; identical to SEQ ID NO: 2143
  Description of Artificial Sequence: Synthetic whey; inner sequence and 3'  sequence

SEQ ID NO: 46470 - DNA, 53 bp, Artificial Sequence
  Description of Artificial Sequence: Synthetic whey; inner sequence and 3'  sequence
gcactgaacgcaccctatcatgtaggcatgttgactagtacatgaccacttga

SEQ ID NO: 46471 - DNA, 53 bp, Artificial Sequence; identical to SEQ ID NO: 2034
  Description of Artificial Sequence: Synthetic whey; inner sequence and 3'  sequence

SEQ ID NO: 46472 - DNA, 53 bp, Artificial Sequence
  Description of Artificial Sequence: Synthetic whey; inner sequence and 3'  sequence
ggacgcaacgtaccgtatcgtggccatgttttgactagtacatgaccacttga

SEQ ID NO: 46473 - DNA, 53 bp, Artificial Sequence
  Description of Artificial Sequence: Synthetic whey; inner sequence and 3'  sequence
gtcatgacatcccttcgagtgtgacaggtattgactagtacatgaccacttga

SEQ ID NO: 46474 - DNA, 53 bp, Artificial Sequence; identical to SEQ ID NO: 22737
  Description of Artificial Sequence: Synthetic whey; inner sequence and 3'  sequence

SEQ ID NO: 46475 - DNA, 53 bp, Artificial Sequence; identical to SEQ ID NO: 26852
  Description of Artificial Sequence: Synthetic whey; inner sequence and 3'  sequence

SEQ ID NO: 46476 - DNA, 53 bp, Artificial Sequence; identical to SEQ ID NO: 14985
  Description of Artificial Sequence: Synthetic whey; inner sequence and 3'  sequence

SEQ ID NO: 46477 - DNA, 53 bp, Artificial Sequence; identical to SEQ ID NO: 2630
  Description of Artificial Sequence: Synthetic whey; inner sequence and 3'  sequence

SEQ ID NO: 46478 - DNA, 53 bp, Artificial Sequence; identical to SEQ ID NO: 10798
  Description of Artificial Sequence: Synthetic whey; inner sequence and 3'  sequence

SEQ ID NO: 46479 - DNA, 53 bp, Artificial Sequence
  Description of Artificial Sequence: Synthetic whey; inner sequence and 3'  sequence
cgtacgacacggatacgtcctgtctgcacgttgactagtacatgaccacttga

SEQ ID NO: 46480 - DNA, 53 bp, Artificial Sequence; identical to SEQ ID NO: 2321
  Description of Artificial Sequence: Synthetic whey; inner sequence and 3'  sequence

SEQ ID NO: 46481 - DNA, 53 bp, Artificial Sequence; identical to SEQ ID NO: 22801
  Description of Artificial Sequence: Synthetic whey; inner sequence and 3'  sequence

SEQ ID NO: 46482 - DNA, 53 bp, Artificial Sequence; identical to SEQ ID NO: 2137
  Description of Artificial Sequence: Synthetic whey; inner sequence and 3'  sequence

SEQ ID NO: 46483 - DNA, 53 bp, Artificial Sequence; identical to SEQ ID NO: 2553
  Description of Artificial Sequence: Synthetic whey; inner sequence and 3'  sequence

SEQ ID NO: 46484 - DNA, 53 bp, Artificial Sequence
  Description of Artificial Sequence: Synthetic whey; inner sequence and 3'  sequence
gtacgcatcgtcccgtcatgtggatccgtattgactagtacatgaccacttga

SEQ ID NO: 46485 - DNA, 53 bp, Artificial Sequence; identical to SEQ ID NO: 22776
  Description of Artificial Sequence: Synthetic whey; inner sequence and 3'  sequence

SEQ ID NO: 46486 - DNA, 53 bp, Artificial Sequence; identical to SEQ ID NO: 22903
  Description of Artificial Sequence: Synthetic whey; inner sequence and 3'  sequence

SEQ ID NO: 46487 - DNA, 53 bp, Artificial Sequence
  Description of Artificial Sequence: Synthetic whey; inner sequence and 3'  sequence
ttcattccgcatcctacacgtgggcacgtattgactagtacatgaccacttga

SEQ ID NO: 46488 - DNA, 53 bp, Artificial Sequence; identical to SEQ ID NO: 2088
  Description of Artificial Sequence: Synthetic whey; inner sequence and 3'  sequence

SEQ ID NO: 46489 - DNA, 53 bp, Artificial Sequence; identical to SEQ ID NO: 22982
  Description of Artificial Sequence: Synthetic whey; inner sequence and 3'  sequence

SEQ ID NO: 46490 - DNA, 53 bp, Artificial Sequence
  Description of Artificial Sequence: Synthetic whey; inner sequence and 3'  sequence
ggactcaacgtaccgtatcgtggccatgtgttgactagtacatgaccacttga

SEQ ID NO: 46491 - DNA, 53 bp, Artificial Sequence; identical to SEQ ID NO: 22746
  Description of Artificial Sequence: Synthetic whey; inner sequence and 3'  sequence

SEQ ID NO: 46492 - DNA, 53 bp, Artificial Sequence; identical to SEQ ID NO: 2282
  Description of Artificial Sequence: Synthetic whey; inner sequence and 3'  sequence

SEQ ID NO: 46493 - DNA, 53 bp, Artificial Sequence
  Description of Artificial Sequence: Synthetic whey; inner sequence and 3'  sequence
cgtgcagcacgtacattgcgtcacgttggcttgactagtacatgaccacttga

SEQ ID NO: 46494 - DNA, 53 bp, Artificial Sequence; identical to SEQ ID NO: 18948
  Description of Artificial Sequence: Synthetic whey; inner sequence and 3'  sequence

SEQ ID NO: 46495 - DNA, 53 bp, Artificial Sequence; identical to SEQ ID NO: 22519
  Description of Artificial Sequence: Synthetic whey; inner sequence and 3'  sequence

SEQ ID NO: 46496 - DNA, 53 bp, Artificial Sequence; identical to SEQ ID NO: 2493
  Description of Artificial Sequence: Synthetic whey; inner sequence and 3'  sequence

SEQ ID NO: 46497 - DNA, 53 bp, Artificial Sequence
  Description of Artificial Sequence: Synthetic whey; inner sequence and 3'  sequence
gtacgcatcgtcccgtcatgtggttcagtattgactagtacatgaccacttga

SEQ ID NO: 46498 - DNA, 53 bp, Artificial Sequence; identical to SEQ ID NO: 22869
  Description of Artificial Sequence: Synthetic whey; inner sequence and 3'  sequence

SEQ ID NO: 46499 - DNA, 53 bp, Artificial Sequence
  Description of Artificial Sequence: Synthetic whey; inner sequence and 3'  sequence
acgtcaaaacgcagtgcatcacgttgcgcattgactagtacatgaccacttga

SEQ ID NO: 46500 - DNA, 53 bp, Artificial Sequence
  Description of Artificial Sequence: Synthetic whey; inner sequence and 3'  sequence
gtcatgccatcccttcgagtgtgaccggtattgactagtacatgaccacttga

SEQ ID NO: 46501 - DNA, 53 bp, Artificial Sequence; identical to SEQ ID NO: 7001
  Description of Artificial Sequence: Synthetic whey; inner sequence and 3'  sequence

SEQ ID NO: 46502 - DNA, 53 bp, Artificial Sequence; identical to SEQ ID NO: 2551
  Description of Artificial Sequence: Synthetic whey; inner sequence and 3'  sequence

SEQ ID NO: 46503 - DNA, 53 bp, Artificial Sequence; identical to SEQ ID NO: 34190
  Description of Artificial Sequence: Synthetic whey; inner sequence and 3'  sequence

SEQ ID NO: 46504 - DNA, 53 bp, Artificial Sequence; identical to SEQ ID NO: 30874
  Description of Artificial Sequence: Synthetic whey; inner sequence and 3'  sequence

SEQ ID NO: 46505 - DNA, 53 bp, Artificial Sequence; identical to SEQ ID NO: 22269
  Description of Artificial Sequence: Synthetic whey; inner sequence and 3'  sequence

SEQ ID NO: 46506 - DNA, 53 bp, Artificial Sequence; identical to SEQ ID NO: 30860
  Description of Artificial Sequence: Synthetic whey; inner sequence and 3'  sequence

SEQ ID NO: 46507 - DNA, 53 bp, Artificial Sequence
  Description of Artificial Sequence: Synthetic whey; inner sequence and 3'  sequence
ggacgactcgcaccctatcatgtaggcatgttgactagtacatgaccacttga

SEQ ID NO: 46508 - DNA, 53 bp, Artificial Sequence; identical to SEQ ID NO: 2324
  Description of Artificial Sequence: Synthetic whey; inner sequence and 3'  sequence

SEQ ID NO: 46509 - DNA, 53 bp, Artificial Sequence
  Description of Artificial Sequence: Synthetic whey; inner sequence and 3'  sequence
cgtgacgtaacggcaaggtgaccatgcacattgactagtacatgaccacttga

SEQ ID NO: 46510 - DNA, 53 bp, Artificial Sequence; identical to SEQ ID NO: 2580
  Description of Artificial Sequence: Synthetic whey; inner sequence and 3'  sequence

SEQ ID NO: 46511 - DNA, 53 bp, Artificial Sequence
  Description of Artificial Sequence: Synthetic whey; inner sequence and 3'  sequence
gtcatgccatcccttctagtgtgacaggtattgactagtacatgaccacttga

SEQ ID NO: 46512 - DNA, 53 bp, Artificial Sequence; identical to SEQ ID NO: 2868
  Description of Artificial Sequence: Synthetic whey; inner sequence and 3'  sequence

SEQ ID NO: 46513 - DNA, 53 bp, Artificial Sequence; identical to SEQ ID NO: 22286
  Description of Artificial Sequence: Synthetic whey; inner sequence and 3'  sequence

SEQ ID NO: 46514 - DNA, 53 bp, Artificial Sequence; identical to SEQ ID NO: 30780
  Description of Artificial Sequence: Synthetic whey; inner sequence and 3'  sequence

SEQ ID NO: 46515 - DNA, 53 bp, Artificial Sequence; identical to SEQ ID NO: 6918
  Description of Artificial Sequence: Synthetic whey; inner sequence and 3'  sequence

SEQ ID NO: 46516 - DNA, 53 bp, Artificial Sequence; identical to SEQ ID NO: 18265
  Description of Artificial Sequence: Synthetic whey; inner sequence and 3'  sequence

SEQ ID NO: 46517 - DNA, 53 bp, Artificial Sequence; identical to SEQ ID NO: 2945
  Description of Artificial Sequence: Synthetic whey; inner sequence and 3'  sequence

SEQ ID NO: 46518 - DNA, 53 bp, Artificial Sequence; identical to SEQ ID NO: 10938
  Description of Artificial Sequence: Synthetic whey; inner sequence and 3'  sequence

SEQ ID NO: 46519 - DNA, 53 bp, Artificial Sequence; identical to SEQ ID NO: 14659
  Description of Artificial Sequence: Synthetic whey; inner sequence and 3'  sequence

SEQ ID NO: 46520 - DNA, 53 bp, Artificial Sequence; identical to SEQ ID NO: 6997
  Description of Artificial Sequence: Synthetic whey; inner sequence and 3'  sequence

SEQ ID NO: 46521 - DNA, 53 bp, Artificial Sequence
  Description of Artificial Sequence: Synthetic whey; inner sequence and 3'  sequence
gtcatgccatcccttcgagtgttacaggtattgactagtacatgaccacttga

SEQ ID NO: 46522 - DNA, 53 bp, Artificial Sequence; identical to SEQ ID NO: 22229
  Description of Artificial Sequence: Synthetic whey; inner sequence and 3'  sequence

SEQ ID NO: 46523 - DNA, 53 bp, Artificial Sequence; identical to SEQ ID NO: 22784
  Description of Artificial Sequence: Synthetic whey; inner sequence and 3'  sequence

SEQ ID NO: 46524 - DNA, 53 bp, Artificial Sequence
  Description of Artificial Sequence: Synthetic whey; inner sequence and 3'  sequence
acgtcaacatggcgcggttcgtaacgcacattgactagtacatgaccacttga

SEQ ID NO: 46525 - DNA, 53 bp, Artificial Sequence; identical to SEQ ID NO: 2173
  Description of Artificial Sequence: Synthetic whey; inner sequence and 3'  sequence

SEQ ID NO: 46526 - DNA, 53 bp, Artificial Sequence; identical to SEQ ID NO: 2140
  Description of Artificial Sequence: Synthetic whey; inner sequence and 3'  sequence

SEQ ID NO: 46527 - DNA, 53 bp, Artificial Sequence
  Description of Artificial Sequence: Synthetic whey; inner sequence and 3'  sequence
gcacttcacgcaccctatcatgtaggcatgttgactagtacatgaccacttga

SEQ ID NO: 46528 - DNA, 49 bp, Artificial Sequence; identical to SEQ ID NO: 2893
  Description of Artificial Sequence: Synthetic whey; inner sequence and 3'  sequence

SEQ ID NO: 46529 - DNA, 53 bp, Artificial Sequence; identical to SEQ ID NO: 6420
  Description of Artificial Sequence: Synthetic whey; inner sequence and 3'  sequence

SEQ ID NO: 46530 - DNA, 53 bp, Artificial Sequence; identical to SEQ ID NO: 7002
  Description of Artificial Sequence: Synthetic whey; inner sequence and 3'  sequence

SEQ ID NO: 46531 - DNA, 53 bp, Artificial Sequence
  Description of Artificial Sequence: Synthetic whey; inner sequence and 3'  sequence
gtacgcatcgtcccgccatgtggttccgtattgactagtacatgaccacttga

SEQ ID NO: 46532 - DNA, 53 bp, Artificial Sequence; identical to SEQ ID NO: 2828
  Description of Artificial Sequence: Synthetic whey; inner sequence and 3'  sequence

SEQ ID NO: 46533 - DNA, 52 bp, Artificial Sequence
  Description of Artificial Sequence: Synthetic whey; inner sequence and 3'  sequence
cgatacggcatgatcgtacgtgctgctgcttgactagtacatgaccacttga

SEQ ID NO: 46534 - DNA, 53 bp, Artificial Sequence; identical to SEQ ID NO: 22972
  Description of Artificial Sequence: Synthetic whey; inner sequence and 3'  sequence

SEQ ID NO: 46535 - DNA, 53 bp, Artificial Sequence; identical to SEQ ID NO: 22988
  Description of Artificial Sequence: Synthetic whey; inner sequence and 3'  sequence

SEQ ID NO: 46536 - DNA, 53 bp, Artificial Sequence; identical to SEQ ID NO: 38797
  Description of Artificial Sequence: Synthetic whey; inner sequence and 3'  sequence

SEQ ID NO: 46537 - DNA, 53 bp, Artificial Sequence; identical to SEQ ID NO: 18352
  Description of Artificial Sequence: Synthetic whey; inner sequence and 3'  sequence

SEQ ID NO: 46538 - DNA, 53 bp, Artificial Sequence; identical to SEQ ID NO: 2105
  Description of Artificial Sequence: Synthetic whey; inner sequence and 3'  sequence

SEQ ID NO: 46539 - DNA, 53 bp, Artificial Sequence; identical to SEQ ID NO: 2270
  Description of Artificial Sequence: Synthetic whey; inner sequence and 3'  sequence

SEQ ID NO: 46540 - DNA, 53 bp, Artificial Sequence; identical to SEQ ID NO: 2042
  Description of Artificial Sequence: Synthetic whey; inner sequence and 3'  sequence

SEQ ID NO: 46541 - DNA, 53 bp, Artificial Sequence; identical to SEQ ID NO: 38768
  Description of Artificial Sequence: Synthetic whey; inner sequence and 3'  sequence

SEQ ID NO: 46542 - DNA, 53 bp, Artificial Sequence
  Description of Artificial Sequence: Synthetic whey; inner sequence and 3'  sequence
acgtcgcatgcgtaacgtacgtccatcgcgttgactagtacatgaccacttga

SEQ ID NO: 46543 - DNA, 53 bp, Artificial Sequence; identical to SEQ ID NO: 2106
  Description of Artificial Sequence: Synthetic whey; inner sequence and 3'  sequence

SEQ ID NO: 46544 - DNA, 53 bp, Artificial Sequence
  Description of Artificial Sequence: Synthetic whey; inner sequence and 3'  sequence
acgtcacacaacggtacgtatgcactgcgtttgactagtacatgaccacttga

SEQ ID NO: 46545 - DNA, 53 bp, Artificial Sequence
  Description of Artificial Sequence: Synthetic whey; inner sequence and 3'  sequence
ccatagcgtcactatcatgtgtgtcacgtattgactagtacatgaccacttga

SEQ ID NO: 46546 - DNA, 53 bp, Artificial Sequence; identical to SEQ ID NO: 18726
  Description of Artificial Sequence: Synthetic whey; inner sequence and 3'  sequence

SEQ ID NO: 46547 - DNA, 53 bp, Artificial Sequence
  Description of Artificial Sequence: Synthetic whey; inner sequence and 3'  sequence
gggcacagcgtacctcaacgtggacgtgcattgactagtacatgaccacttga

SEQ ID NO: 46548 - DNA, 53 bp, Artificial Sequence; identical to SEQ ID NO: 30688
  Description of Artificial Sequence: Synthetic whey; inner sequence and 3'  sequence

SEQ ID NO: 46549 - DNA, 53 bp, Artificial Sequence
  Description of Artificial Sequence: Synthetic whey; inner sequence and 3'  sequence
cgtgacgtagcgaggcgtactgcatgcgcgttgactagtacatgaccacttga

SEQ ID NO: 46550 - DNA, 53 bp, Artificial Sequence; identical to SEQ ID NO: 30582
  Description of Artificial Sequence: Synthetic whey; inner sequence and 3'  sequence

SEQ ID NO: 46551 - DNA, 53 bp, Artificial Sequence; identical to SEQ ID NO: 6707
  Description of Artificial Sequence: Synthetic whey; inner sequence and 3'  sequence

SEQ ID NO: 46552 - DNA, 53 bp, Artificial Sequence
  Description of Artificial Sequence: Synthetic whey; inner sequence and 3'  sequence
cgtgcacacgacaggatacgttgcgacacgttgactagtacatgaccacttga

SEQ ID NO: 46553 - DNA, 53 bp, Artificial Sequence; identical to SEQ ID NO: 22817
  Description of Artificial Sequence: Synthetic whey; inner sequence and 3'  sequence

SEQ ID NO: 46554 - DNA, 53 bp, Artificial Sequence; identical to SEQ ID NO: 22880
  Description of Artificial Sequence: Synthetic whey; inner sequence and 3'  sequence

SEQ ID NO: 46555 - DNA, 53 bp, Artificial Sequence
  Description of Artificial Sequence: Synthetic whey; inner sequence and 3'  sequence
cgtacacactgacgacatacgtgctgcacattgactagtacatgaccacttga

SEQ ID NO: 46556 - DNA, 53 bp, Artificial Sequence
  Description of Artificial Sequence: Synthetic whey; inner sequence and 3'  sequence
gtcactgtgcctgaccgacaagttgcggcattgactagtacatgaccacttga

SEQ ID NO: 46557 - DNA, 53 bp, Artificial Sequence; identical to SEQ ID NO: 30503
  Description of Artificial Sequence: Synthetic whey; inner sequence and 3'  sequence

SEQ ID NO: 46558 - DNA, 53 bp, Artificial Sequence; identical to SEQ ID NO: 22417
  Description of Artificial Sequence: Synthetic whey; inner sequence and 3'  sequence

SEQ ID NO: 46559 - DNA, 53 bp, Artificial Sequence; identical to SEQ ID NO: 22580
  Description of Artificial Sequence: Synthetic whey; inner sequence and 3'  sequence

SEQ ID NO: 46560 - DNA, 53 bp, Artificial Sequence
  Description of Artificial Sequence: Synthetic whey; inner sequence and 3'  sequence
tgcgtgtcgtacgcatacgtgtgctgcgtgttgactagtacatgaccacttga

SEQ ID NO: 46561 - DNA, 53 bp, Artificial Sequence
  Description of Artificial Sequence: Synthetic whey; inner sequence and 3'  sequence
gtccgcatcgtcccgtcatgtggttccgtattgactagtacatgaccacttga

SEQ ID NO: 46562 - DNA, 53 bp, Artificial Sequence; identical to SEQ ID NO: 22410
  Description of Artificial Sequence: Synthetic whey; inner sequence and 3'  sequence

SEQ ID NO: 46563 - DNA, 53 bp, Artificial Sequence; identical to SEQ ID NO: 2559
  Description of Artificial Sequence: Synthetic whey; inner sequence and 3'  sequence

SEQ ID NO: 46564 - DNA, 53 bp, Artificial Sequence; identical to SEQ ID NO: 2661
  Description of Artificial Sequence: Synthetic whey; inner sequence and 3'  sequence

SEQ ID NO: 46565 - DNA, 53 bp, Artificial Sequence
  Description of Artificial Sequence: Synthetic whey; inner sequence and 3'  sequence
gcacgcctcgcaccctatcatgtaggcatgttgactagtacatgaccacttga

SEQ ID NO: 46566 - DNA, 53 bp, Artificial Sequence; identical to SEQ ID NO: 2247
  Description of Artificial Sequence: Synthetic whey; inner sequence and 3'  sequence

SEQ ID NO: 46567 - DNA, 53 bp, Artificial Sequence; identical to SEQ ID NO: 6229
  Description of Artificial Sequence: Synthetic whey; inner sequence and 3'  sequence

SEQ ID NO: 46568 - DNA, 53 bp, Artificial Sequence; identical to SEQ ID NO: 2236
  Description of Artificial Sequence: Synthetic whey; inner sequence and 3'  sequence

SEQ ID NO: 46569 - DNA, 53 bp, Artificial Sequence; identical to SEQ ID NO: 2543
  Description of Artificial Sequence: Synthetic whey; inner sequence and 3'  sequence

SEQ ID NO: 46570 - DNA, 54 bp, Artificial Sequence; identical to SEQ ID NO: 2250
  Description of Artificial Sequence: Synthetic whey; inner sequence and 3'  sequence

SEQ ID NO: 46571 - DNA, 53 bp, Artificial Sequence; identical to SEQ ID NO: 18950
  Description of Artificial Sequence: Synthetic whey; inner sequence and 3'  sequence

SEQ ID NO: 46572 - DNA, 53 bp, Artificial Sequence; identical to SEQ ID NO: 2913
  Description of Artificial Sequence: Synthetic whey; inner sequence and 3'  sequence

SEQ ID NO: 46573 - DNA, 53 bp, Artificial Sequence; identical to SEQ ID NO: 6867
  Description of Artificial Sequence: Synthetic whey; inner sequence and 3'  sequence

SEQ ID NO: 46574 - DNA, 53 bp, Artificial Sequence; identical to SEQ ID NO: 30739
  Description of Artificial Sequence: Synthetic whey; inner sequence and 3'  sequence

SEQ ID NO: 46575 - DNA, 53 bp, Artificial Sequence; identical to SEQ ID NO: 22372
  Description of Artificial Sequence: Synthetic whey; inner sequence and 3'  sequence

SEQ ID NO: 46576 - DNA, 53 bp, Artificial Sequence; identical to SEQ ID NO: 30672
  Description of Artificial Sequence: Synthetic whey; inner sequence and 3'  sequence

SEQ ID NO: 46577 - DNA, 53 bp, Artificial Sequence
  Description of Artificial Sequence: Synthetic whey; inner sequence and 3'  sequence
cgagacaacgtgacgtgccgatgcgacgcgttgactagtacatgaccacttga

SEQ ID NO: 46578 - DNA, 53 bp, Artificial Sequence; identical to SEQ ID NO: 2139
  Description of Artificial Sequence: Synthetic whey; inner sequence and 3'  sequence

SEQ ID NO: 46579 - DNA, 53 bp, Artificial Sequence; identical to SEQ ID NO: 30914
  Description of Artificial Sequence: Synthetic whey; inner sequence and 3'  sequence

SEQ ID NO: 46580 - DNA, 53 bp, Artificial Sequence
  Description of Artificial Sequence: Synthetic whey; inner sequence and 3'  sequence
cgtgcgcatggcagcatacgtccgtacgcgttgactagtacatgaccacttga

SEQ ID NO: 46581 - DNA, 53 bp, Artificial Sequence; identical to SEQ ID NO: 22979
  Description of Artificial Sequence: Synthetic whey; inner sequence and 3'  sequence

SEQ ID NO: 46582 - DNA, 53 bp, Artificial Sequence
  Description of Artificial Sequence: Synthetic whey; inner sequence and 3'  sequence
acgatgcggcacaacgtcacgtacgtagcgttgactagtacatgaccacttga

SEQ ID NO: 46583 - DNA, 53 bp, Artificial Sequence
  Description of Artificial Sequence: Synthetic whey; inner sequence and 3'  sequence
ttcatgcacgaacactatcatggcggcatgttgactagtacatgaccacttga

SEQ ID NO: 46584 - DNA, 53 bp, Artificial Sequence; identical to SEQ ID NO: 2122
  Description of Artificial Sequence: Synthetic whey; inner sequence and 3'  sequence

SEQ ID NO: 46585 - DNA, 53 bp, Artificial Sequence; identical to SEQ ID NO: 30805
  Description of Artificial Sequence: Synthetic whey; inner sequence and 3'  sequence

SEQ ID NO: 46586 - DNA, 53 bp, Artificial Sequence; identical to SEQ ID NO: 2124
  Description of Artificial Sequence: Synthetic whey; inner sequence and 3'  sequence

SEQ ID NO: 46587 - DNA, 53 bp, Artificial Sequence; identical to SEQ ID NO: 2196
  Description of Artificial Sequence: Synthetic whey; inner sequence and 3'  sequence

SEQ ID NO: 46588 - DNA, 53 bp, Artificial Sequence; identical to SEQ ID NO: 2287
  Description of Artificial Sequence: Synthetic whey; inner sequence and 3'  sequence

SEQ ID NO: 46589 - DNA, 53 bp, Artificial Sequence; identical to SEQ ID NO: 2064
  Description of Artificial Sequence: Synthetic whey; inner sequence and 3'  sequence

SEQ ID NO: 46590 - DNA, 53 bp, Artificial Sequence; identical to SEQ ID NO: 18688
  Description of Artificial Sequence: Synthetic whey; inner sequence and 3'  sequence

SEQ ID NO: 46591 - DNA, 53 bp, Artificial Sequence; identical to SEQ ID NO: 2032
  Description of Artificial Sequence: Synthetic whey; inner sequence and 3'  sequence

SEQ ID NO: 46592 - DNA, 53 bp, Artificial Sequence; identical to SEQ ID NO: 2248
  Description of Artificial Sequence: Synthetic whey; inner sequence and 3'  sequence

SEQ ID NO: 46593 - DNA, 53 bp, Artificial Sequence; identical to SEQ ID NO: 2154
  Description of Artificial Sequence: Synthetic whey; inner sequence and 3'  sequence

SEQ ID NO: 46594 - DNA, 53 bp, Artificial Sequence; identical to SEQ ID NO: 30806
  Description of Artificial Sequence: Synthetic whey; inner sequence and 3'  sequence

SEQ ID NO: 46595 - DNA, 53 bp, Artificial Sequence
  Description of Artificial Sequence: Synthetic whey; inner sequence and 3'  sequence
gtcactgtgcctgaccgccaagttgcggcattgactagtacatgaccacttga

SEQ ID NO: 46596 - DNA, 53 bp, Artificial Sequence
  Description of Artificial Sequence: Synthetic whey; inner sequence and 3'  sequence
gtcattgtgcctgaccgtcaagttgcggcattgactagtacatgaccacttga

SEQ ID NO: 46597 - DNA, 53 bp, Artificial Sequence
  Description of Artificial Sequence: Synthetic whey; inner sequence and 3'  sequence
ggacgcaacgtaccgcatcgtggccatgtattgactagtacatgaccacttga

SEQ ID NO: 46598 - DNA, 53 bp, Artificial Sequence; identical to SEQ ID NO: 30959
  Description of Artificial Sequence: Synthetic whey; inner sequence and 3'  sequence

SEQ ID NO: 46599 - DNA, 53 bp, Artificial Sequence
  Description of Artificial Sequence: Synthetic whey; inner sequence and 3'  sequence
acgacggcacgacgtaagcatgacggtgtgttgactagtacatgaccacttga

SEQ ID NO: 46600 - DNA, 53 bp, Artificial Sequence; identical to SEQ ID NO: 2928
  Description of Artificial Sequence: Synthetic whey; inner sequence and 3'  sequence

SEQ ID NO: 46601 - DNA, 53 bp, Artificial Sequence; identical to SEQ ID NO: 2420
  Description of Artificial Sequence: Synthetic whey; inner sequence and 3'  sequence

SEQ ID NO: 46602 - DNA, 53 bp, Artificial Sequence
  Description of Artificial Sequence: Synthetic whey; inner sequence and 3'  sequence
cgtgacaacgttgcgacatcatgctgcacgttgactagtacatgaccacttga

SEQ ID NO: 46603 - DNA, 53 bp, Artificial Sequence; identical to SEQ ID NO: 10953
  Description of Artificial Sequence: Synthetic whey; inner sequence and 3'  sequence

SEQ ID NO: 46604 - DNA, 53 bp, Artificial Sequence; identical to SEQ ID NO: 22502
  Description of Artificial Sequence: Synthetic whey; inner sequence and 3'  sequence

SEQ ID NO: 46605 - DNA, 51 bp, Artificial Sequence; identical to SEQ ID NO: 6786
  Description of Artificial Sequence: Synthetic whey; inner sequence and 3'  sequence

SEQ ID NO: 46606 - DNA, 53 bp, Artificial Sequence; identical to SEQ ID NO: 2076
  Description of Artificial Sequence: Synthetic whey; inner sequence and 3'  sequence

SEQ ID NO: 46607 - DNA, 53 bp, Artificial Sequence; identical to SEQ ID NO: 30907
  Description of Artificial Sequence: Synthetic whey; inner sequence and 3'  sequence

SEQ ID NO: 46608 - DNA, 53 bp, Artificial Sequence; identical to SEQ ID NO: 14821
  Description of Artificial Sequence: Synthetic whey; inner sequence and 3'  sequence

SEQ ID NO: 46609 - DNA, 53 bp, Artificial Sequence
  Description of Artificial Sequence: Synthetic whey; inner sequence and 3'  sequence
tgacgcaacgtaccgtatcgtggccatgtattgactagtacatgaccacttga

SEQ ID NO: 46610 - DNA, 53 bp, Artificial Sequence
  Description of Artificial Sequence: Synthetic whey; inner sequence and 3'  sequence
ggacgccacgtaccgtatcgtggccatgtattgactagtacatgaccacttga

SEQ ID NO: 46611 - DNA, 53 bp, Artificial Sequence
  Description of Artificial Sequence: Synthetic whey; inner sequence and 3'  sequence
cacgtgacgtacgtagcagtgtggccgatcttgactagtacatgaccacttga

SEQ ID NO: 46612 - DNA, 53 bp, Artificial Sequence; identical to SEQ ID NO: 2678
  Description of Artificial Sequence: Synthetic whey; inner sequence and 3'  sequence

SEQ ID NO: 46613 - DNA, 53 bp, Artificial Sequence; identical to SEQ ID NO: 34191
  Description of Artificial Sequence: Synthetic whey; inner sequence and 3'  sequence

SEQ ID NO: 46614 - DNA, 53 bp, Artificial Sequence
  Description of Artificial Sequence: Synthetic whey; inner sequence and 3'  sequence
gacacacagtgacgtcaccatgccgtatcgttgactagtacatgaccacttga

SEQ ID NO: 46615 - DNA, 53 bp, Artificial Sequence; identical to SEQ ID NO: 2099
  Description of Artificial Sequence: Synthetic whey; inner sequence and 3'  sequence

SEQ ID NO: 46616 - DNA, 53 bp, Artificial Sequence; identical to SEQ ID NO: 2136
  Description of Artificial Sequence: Synthetic whey; inner sequence and 3'  sequence

SEQ ID NO: 46617 - DNA, 53 bp, Artificial Sequence; identical to SEQ ID NO: 22515
  Description of Artificial Sequence: Synthetic whey; inner sequence and 3'  sequence

SEQ ID NO: 46618 - DNA, 53 bp, Artificial Sequence; identical to SEQ ID NO: 6940
  Description of Artificial Sequence: Synthetic whey; inner sequence and 3'  sequence

SEQ ID NO: 46619 - DNA, 53 bp, Artificial Sequence
  Description of Artificial Sequence: Synthetic whey; inner sequence and 3'  sequence
gtacgcatcttcccgtcatgtggttccgtattgactagtacatgaccacttga

SEQ ID NO: 46620 - DNA, 53 bp, Artificial Sequence
  Description of Artificial Sequence: Synthetic whey; inner sequence and 3'  sequence
gtcactgtgcctgaccgtcaaggtgcggcattgactagtacatgaccacttga

SEQ ID NO: 46621 - DNA, 53 bp, Artificial Sequence; identical to SEQ ID NO: 2291
  Description of Artificial Sequence: Synthetic whey; inner sequence and 3'  sequence

SEQ ID NO: 46622 - DNA, 53 bp, Artificial Sequence; identical to SEQ ID NO: 30677
  Description of Artificial Sequence: Synthetic whey; inner sequence and 3'  sequence

SEQ ID NO: 46623 - DNA, 53 bp, Artificial Sequence
  Description of Artificial Sequence: Synthetic whey; inner sequence and 3'  sequence
gcgttacggtgcacgagtacgtccttcgcgttgactagtacatgaccacttga

SEQ ID NO: 46624 - DNA, 53 bp, Artificial Sequence; identical to SEQ ID NO: 30312
  Description of Artificial Sequence: Synthetic whey; inner sequence and 3'  sequence

SEQ ID NO: 46625 - DNA, 53 bp, Artificial Sequence; identical to SEQ ID NO: 6790
  Description of Artificial Sequence: Synthetic whey; inner sequence and 3'  sequence

SEQ ID NO: 46626 - DNA, 49 bp, Artificial Sequence
  Description of Artificial Sequence: Synthetic whey; inner sequence and 3'  sequence
gtcatgccatcccttcgagtgtgacattgactagtacatgaccacttga

SEQ ID NO: 46627 - DNA, 53 bp, Artificial Sequence
  Description of Artificial Sequence: Synthetic whey; inner sequence and 3'  sequence
ggacgcaacgtaccgtatcgtgtccatgtattgactagtacatgaccacttga

SEQ ID NO: 46628 - DNA, 53 bp, Artificial Sequence; identical to SEQ ID NO: 30979
  Description of Artificial Sequence: Synthetic whey; inner sequence and 3'  sequence

SEQ ID NO: 46629 - DNA, 53 bp, Artificial Sequence; identical to SEQ ID NO: 2688
  Description of Artificial Sequence: Synthetic whey; inner sequence and 3'  sequence

SEQ ID NO: 46630 - DNA, 53 bp, Artificial Sequence; identical to SEQ ID NO: 18677
  Description of Artificial Sequence: Synthetic whey; inner sequence and 3'  sequence

SEQ ID NO: 46631 - DNA, 53 bp, Artificial Sequence; identical to SEQ ID NO: 30791
  Description of Artificial Sequence: Synthetic whey; inner sequence and 3'  sequence

SEQ ID NO: 46632 - DNA, 53 bp, Artificial Sequence; identical to SEQ ID NO: 30846
  Description of Artificial Sequence: Synthetic whey; inner sequence and 3'  sequence

SEQ ID NO: 46633 - DNA, 53 bp, Artificial Sequence; identical to SEQ ID NO: 2751
  Description of Artificial Sequence: Synthetic whey; inner sequence and 3'  sequence

SEQ ID NO: 46634 - DNA, 53 bp, Artificial Sequence
  Description of Artificial Sequence: Synthetic whey; inner sequence and 3'  sequence
gtacgcatcgtcccgtcatgtggttccgtgttgactagtacatgaccacttga

SEQ ID NO: 46635 - DNA, 53 bp, Artificial Sequence
  Description of Artificial Sequence: Synthetic whey; inner sequence and 3'  sequence
gtcaatgtgcctgaccgtcaagttgcggcattgactagtacatgaccacttga

SEQ ID NO: 46636 - DNA, 53 bp, Artificial Sequence
  Description of Artificial Sequence: Synthetic whey; inner sequence and 3'  sequence
gtcactgtgcctgacagtcaagttgcggcattgactagtacatgaccacttga

SEQ ID NO: 46637 - DNA, 53 bp, Artificial Sequence
  Description of Artificial Sequence: Synthetic whey; inner sequence and 3'  sequence
ggccacagagtacctcaacgtggacgtgcattgactagtacatgaccacttga

SEQ ID NO: 46638 - DNA, 53 bp, Artificial Sequence; identical to SEQ ID NO: 18531
  Description of Artificial Sequence: Synthetic whey; inner sequence and 3'  sequence

SEQ ID NO: 46639 - DNA, 53 bp, Artificial Sequence
  Description of Artificial Sequence: Synthetic whey; inner sequence and 3'  sequence
gtcatgccatcccttcgagtgcgtcacgtattgactagtacatgaccacttga

SEQ ID NO: 46640 - DNA, 53 bp, Artificial Sequence
  Description of Artificial Sequence: Synthetic whey; inner sequence and 3'  sequence
gtcatgccatcccttcgagtgtgacacgtattgactagtacatgaccacttga

SEQ ID NO: 46641 - DNA, 53 bp, Artificial Sequence
  Description of Artificial Sequence: Synthetic whey; inner sequence and 3'  sequence
cgtgacgatgcgtaacatacgtgctgcctcttgactagtacatgaccacttga

SEQ ID NO: 46642 - DNA, 53 bp, Artificial Sequence
  Description of Artificial Sequence: Synthetic whey; inner sequence and 3'  sequence
acgtcacggtgacgtaacggcgcgcacacgttgactagtacatgaccacttga

SEQ ID NO: 46643 - DNA, 53 bp, Artificial Sequence
  Description of Artificial Sequence: Synthetic whey; inner sequence and 3'  sequence
gtcaccgtgcctgaccgtcaagttgcggcattgactagtacatgaccacttga

SEQ ID NO: 46644 - DNA, 53 bp, Artificial Sequence; identical to SEQ ID NO: 22430
  Description of Artificial Sequence: Synthetic whey; inner sequence and 3'  sequence

SEQ ID NO: 46645 - DNA, 53 bp, Artificial Sequence; identical to SEQ ID NO: 22346
  Description of Artificial Sequence: Synthetic whey; inner sequence and 3'  sequence

SEQ ID NO: 46646 - DNA, 53 bp, Artificial Sequence; identical to SEQ ID NO: 30705
  Description of Artificial Sequence: Synthetic whey; inner sequence and 3'  sequence

SEQ ID NO: 46647 - DNA, 53 bp, Artificial Sequence; identical to SEQ ID NO: 30670
  Description of Artificial Sequence: Synthetic whey; inner sequence and 3'  sequence

SEQ ID NO: 46648 - DNA, 53 bp, Artificial Sequence; identical to SEQ ID NO: 34193
  Description of Artificial Sequence: Synthetic whey; inner sequence and 3'  sequence

SEQ ID NO: 46649 - DNA, 53 bp, Artificial Sequence; identical to SEQ ID NO: 22594
  Description of Artificial Sequence: Synthetic whey; inner sequence and 3'  sequence

SEQ ID NO: 46650 - DNA, 53 bp, Artificial Sequence
  Description of Artificial Sequence: Synthetic whey; inner sequence and 3'  sequence
tgacgtgaggcaacgtgcagacgtgacgcattgactagtacatgaccacttga

SEQ ID NO: 46651 - DNA, 53 bp, Artificial Sequence
  Description of Artificial Sequence: Synthetic whey; inner sequence and 3'  sequence
ggcactgtgcctgaccgtcaagttgcggcattgactagtacatgaccacttga

SEQ ID NO: 46652 - DNA, 53 bp, Artificial Sequence
  Description of Artificial Sequence: Synthetic whey; inner sequence and 3'  sequence
gtacgcatcgttccgtcatgtggttccgtattgactagtacatgaccacttga

SEQ ID NO: 46653 - DNA, 53 bp, Artificial Sequence; identical to SEQ ID NO: 22596
  Description of Artificial Sequence: Synthetic whey; inner sequence and 3'  sequence

SEQ ID NO: 46654 - DNA, 53 bp, Artificial Sequence; identical to SEQ ID NO: 22923
  Description of Artificial Sequence: Synthetic whey; inner sequence and 3'  sequence

SEQ ID NO: 46655 - DNA, 53 bp, Artificial Sequence
  Description of Artificial Sequence: Synthetic whey; inner sequence and 3'  sequence
acatcgcgtcactatcatgtgtgtcacgtattgactagtacatgaccacttga

SEQ ID NO: 46656 - DNA, 53 bp, Artificial Sequence
  Description of Artificial Sequence: Synthetic whey; inner sequence and 3'  sequence
cgatacgcaaggaccatgcgtgacttcgcgttgactagtacatgaccacttga

SEQ ID NO: 46657 - DNA, 53 bp, Artificial Sequence
  Description of Artificial Sequence: Synthetic whey; inner sequence and 3'  sequence
cgacacgtagcacggcacgtcacgtcctgcttgactagtacatgaccacttga

SEQ ID NO: 46658 - DNA, 53 bp, Artificial Sequence; identical to SEQ ID NO: 34505
  Description of Artificial Sequence: Synthetic whey; inner sequence and 3'  sequence

SEQ ID NO: 46659 - DNA, 53 bp, Artificial Sequence; identical to SEQ ID NO: 2998
  Description of Artificial Sequence: Synthetic whey; inner sequence and 3'  sequence

SEQ ID NO: 46660 - DNA, 53 bp, Artificial Sequence; identical to SEQ ID NO: 10926
  Description of Artificial Sequence: Synthetic whey; inner sequence and 3'  sequence

SEQ ID NO: 46661 - DNA, 53 bp, Artificial Sequence; identical to SEQ ID NO: 22960
  Description of Artificial Sequence: Synthetic whey; inner sequence and 3'  sequence

SEQ ID NO: 46662 - DNA, 53 bp, Artificial Sequence
  Description of Artificial Sequence: Synthetic whey; inner sequence and 3'  sequence
gtcatcccgcatcctacacgtgggcacgtattgactagtacatgaccacttga

SEQ ID NO: 46663 - DNA, 53 bp, Artificial Sequence
  Description of Artificial Sequence: Synthetic whey; inner sequence and 3'  sequence
cgacaacgtgacgtgatgtggacgtgcgccttgactagtacatgaccacttga

SEQ ID NO: 46664 - DNA, 53 bp, Artificial Sequence; identical to SEQ ID NO: 19001
  Description of Artificial Sequence: Synthetic whey; inner sequence and 3'  sequence

SEQ ID NO: 46665 - DNA, 53 bp, Artificial Sequence; identical to SEQ ID NO: 2162
  Description of Artificial Sequence: Synthetic whey; inner sequence and 3'  sequence

SEQ ID NO: 46666 - DNA, 53 bp, Artificial Sequence; identical to SEQ ID NO: 22831
  Description of Artificial Sequence: Synthetic whey; inner sequence and 3'  sequence

SEQ ID NO: 46667 - DNA, 53 bp, Artificial Sequence; identical to SEQ ID NO: 22795
  Description of Artificial Sequence: Synthetic whey; inner sequence and 3'  sequence

SEQ ID NO: 46668 - DNA, 53 bp, Artificial Sequence
  Description of Artificial Sequence: Synthetic whey; inner sequence and 3'  sequence
ggacggaacgtaccgtatcgtggccatgtgttgactagtacatgaccacttga

SEQ ID NO: 46669 - DNA, 53 bp, Artificial Sequence; identical to SEQ ID NO: 2406
  Description of Artificial Sequence: Synthetic whey; inner sequence and 3'  sequence

SEQ ID NO: 46670 - DNA, 53 bp, Artificial Sequence; identical to SEQ ID NO: 6837
  Description of Artificial Sequence: Synthetic whey; inner sequence and 3'  sequence

SEQ ID NO: 46671 - DNA, 53 bp, Artificial Sequence; identical to SEQ ID NO: 30844
  Description of Artificial Sequence: Synthetic whey; inner sequence and 3'  sequence

SEQ ID NO: 46672 - DNA, 53 bp, Artificial Sequence; identical to SEQ ID NO: 2452
  Description of Artificial Sequence: Synthetic whey; inner sequence and 3'  sequence

SEQ ID NO: 46673 - DNA, 53 bp, Artificial Sequence; identical to SEQ ID NO: 2103
  Description of Artificial Sequence: Synthetic whey; inner sequence and 3'  sequence

SEQ ID NO: 46674 - DNA, 53 bp, Artificial Sequence
  Description of Artificial Sequence: Synthetic whey; inner sequence and 3'  sequence
ggccatagcgtacctcaacgtggacgtgcattgactagtacatgaccacttga

SEQ ID NO: 46675 - DNA, 53 bp, Artificial Sequence; identical to SEQ ID NO: 2477
  Description of Artificial Sequence: Synthetic whey; inner sequence and 3'  sequence

SEQ ID NO: 46676 - DNA, 53 bp, Artificial Sequence; identical to SEQ ID NO: 18573
  Description of Artificial Sequence: Synthetic whey; inner sequence and 3'  sequence

SEQ ID NO: 46677 - DNA, 53 bp, Artificial Sequence
  Description of Artificial Sequence: Synthetic whey; inner sequence and 3'  sequence
gtcactgagcctgaccgtcaagttgcggcattgactagtacatgaccacttga

SEQ ID NO: 46678 - DNA, 53 bp, Artificial Sequence
  Description of Artificial Sequence: Synthetic whey; inner sequence and 3'  sequence
gcgtcacgatgcatccacatgtactgcgcgttgactagtacatgaccacttga

SEQ ID NO: 46679 - DNA, 53 bp, Artificial Sequence; identical to SEQ ID NO: 34304
  Description of Artificial Sequence: Synthetic whey; inner sequence and 3'  sequence

SEQ ID NO: 46680 - DNA, 53 bp, Artificial Sequence
  Description of Artificial Sequence: Synthetic whey; inner sequence and 3'  sequence
cgtgacacgacacacatcgatgcatgcgcgttgactagtacatgaccacttga

SEQ ID NO: 46681 - DNA, 53 bp, Artificial Sequence; identical to SEQ ID NO: 2242
  Description of Artificial Sequence: Synthetic whey; inner sequence and 3'  sequence

SEQ ID NO: 46682 - DNA, 53 bp, Artificial Sequence; identical to SEQ ID NO: 2089
  Description of Artificial Sequence: Synthetic whey; inner sequence and 3'  sequence

SEQ ID NO: 46683 - DNA, 53 bp, Artificial Sequence; identical to SEQ ID NO: 22815
  Description of Artificial Sequence: Synthetic whey; inner sequence and 3'  sequence

SEQ ID NO: 46684 - DNA, 53 bp, Artificial Sequence; identical to SEQ ID NO: 22724
  Description of Artificial Sequence: Synthetic whey; inner sequence and 3'  sequence

SEQ ID NO: 46685 - DNA, 53 bp, Artificial Sequence; identical to SEQ ID NO: 2375
  Description of Artificial Sequence: Synthetic whey; inner sequence and 3'  sequence

SEQ ID NO: 46686 - DNA, 53 bp, Artificial Sequence; identical to SEQ ID NO: 2687
  Description of Artificial Sequence: Synthetic whey; inner sequence and 3'  sequence

SEQ ID NO: 46687 - DNA, 53 bp, Artificial Sequence; identical to SEQ ID NO: 22650
  Description of Artificial Sequence: Synthetic whey; inner sequence and 3'  sequence

SEQ ID NO: 46688 - DNA, 53 bp, Artificial Sequence
  Description of Artificial Sequence: Synthetic whey; inner sequence and 3'  sequence
cgacgcgcagtgacgtacatgcagttcgccttgactagtacatgaccacttga

SEQ ID NO: 46689 - DNA, 53 bp, Artificial Sequence; identical to SEQ ID NO: 2128
  Description of Artificial Sequence: Synthetic whey; inner sequence and 3'  sequence

SEQ ID NO: 46690 - DNA, 53 bp, Artificial Sequence
  Description of Artificial Sequence: Synthetic whey; inner sequence and 3'  sequence
cgatgcaacgtgacgtgaccattcgccgcgttgactagtacatgaccacttga

SEQ ID NO: 46691 - DNA, 53 bp, Artificial Sequence; identical to SEQ ID NO: 2171
  Description of Artificial Sequence: Synthetic whey; inner sequence and 3'  sequence

SEQ ID NO: 46692 - DNA, 53 bp, Artificial Sequence; identical to SEQ ID NO: 2133
  Description of Artificial Sequence: Synthetic whey; inner sequence and 3'  sequence

SEQ ID NO: 46693 - DNA, 53 bp, Artificial Sequence; identical to SEQ ID NO: 22700
  Description of Artificial Sequence: Synthetic whey; inner sequence and 3'  sequence

SEQ ID NO: 46694 - DNA, 53 bp, Artificial Sequence; identical to SEQ ID NO: 2522
  Description of Artificial Sequence: Synthetic whey; inner sequence and 3'  sequence

SEQ ID NO: 46695 - DNA, 53 bp, Artificial Sequence; identical to SEQ ID NO: 2991
  Description of Artificial Sequence: Synthetic whey; inner sequence and 3'  sequence

SEQ ID NO: 46696 - DNA, 53 bp, Artificial Sequence
  Description of Artificial Sequence: Synthetic whey; inner sequence and 3'  sequence
gtcatgctatcccttcgagtgtgacaggtattgactagtacatgaccacttga

SEQ ID NO: 46697 - DNA, 53 bp, Artificial Sequence; identical to SEQ ID NO: 30389
  Description of Artificial Sequence: Synthetic whey; inner sequence and 3'  sequence

SEQ ID NO: 46698 - DNA, 53 bp, Artificial Sequence
  Description of Artificial Sequence: Synthetic whey; inner sequence and 3'  sequence
ggacgcaccgtaccgtatcgtggccatgtgttgactagtacatgaccacttga

SEQ ID NO: 46699 - DNA, 49 bp, Artificial Sequence
  Description of Artificial Sequence: Synthetic whey; inner sequence and 3'  sequence
gtcatgccatcccttcgagtgcgtcattgactagtacatgaccacttga

SEQ ID NO: 46700 - DNA, 53 bp, Artificial Sequence; identical to SEQ ID NO: 26984
  Description of Artificial Sequence: Synthetic whey; inner sequence and 3'  sequence

SEQ ID NO: 46701 - DNA, 53 bp, Artificial Sequence; identical to SEQ ID NO: 2306
  Description of Artificial Sequence: Synthetic whey; inner sequence and 3'  sequence

SEQ ID NO: 46702 - DNA, 53 bp, Artificial Sequence
  Description of Artificial Sequence: Synthetic whey; inner sequence and 3'  sequence
ccatcccgtcactatcatgtgtgtcacgtattgactagtacatgaccacttga

SEQ ID NO: 46703 - DNA, 53 bp, Artificial Sequence; identical to SEQ ID NO: 2407
  Description of Artificial Sequence: Synthetic whey; inner sequence and 3'  sequence

SEQ ID NO: 46704 - DNA, 53 bp, Artificial Sequence
  Description of Artificial Sequence: Synthetic whey; inner sequence and 3'  sequence
ggaagcaacgtaccgtatcgtggccatgtgttgactagtacatgaccacttga

SEQ ID NO: 46705 - DNA, 53 bp, Artificial Sequence; identical to SEQ ID NO: 2277
  Description of Artificial Sequence: Synthetic whey; inner sequence and 3'  sequence

SEQ ID NO: 46706 - DNA, 53 bp, Artificial Sequence; identical to SEQ ID NO: 30996
  Description of Artificial Sequence: Synthetic whey; inner sequence and 3'  sequence

SEQ ID NO: 46707 - DNA, 53 bp, Artificial Sequence; identical to SEQ ID NO: 2663
  Description of Artificial Sequence: Synthetic whey; inner sequence and 3'  sequence

SEQ ID NO: 46708 - DNA, 53 bp, Artificial Sequence; identical to SEQ ID NO: 2774
  Description of Artificial Sequence: Synthetic whey; inner sequence and 3'  sequence

SEQ ID NO: 46709 - DNA, 53 bp, Artificial Sequence; identical to SEQ ID NO: 18634
  Description of Artificial Sequence: Synthetic whey; inner sequence and 3'  sequence

SEQ ID NO: 46710 - DNA, 53 bp, Artificial Sequence; identical to SEQ ID NO: 2527
  Description of Artificial Sequence: Synthetic whey; inner sequence and 3'  sequence

SEQ ID NO: 46711 - DNA, 53 bp, Artificial Sequence
  Description of Artificial Sequence: Synthetic whey; inner sequence and 3'  sequence
catgcatgacgacgatgcgccttgttcacgttgactagtacatgaccacttga

SEQ ID NO: 46712 - DNA, 53 bp, Artificial Sequence; identical to SEQ ID NO: 2112
  Description of Artificial Sequence: Synthetic whey; inner sequence and 3'  sequence

SEQ ID NO: 46713 - DNA, 53 bp, Artificial Sequence; identical to SEQ ID NO: 18342
  Description of Artificial Sequence: Synthetic whey; inner sequence and 3'  sequence

SEQ ID NO: 46714 - DNA, 53 bp, Artificial Sequence; identical to SEQ ID NO: 2223
  Description of Artificial Sequence: Synthetic whey; inner sequence and 3'  sequence

SEQ ID NO: 46715 - DNA, 53 bp, Artificial Sequence
  Description of Artificial Sequence: Synthetic whey; inner sequence and 3'  sequence
cgtgcgtgacgatgcgaacgtggctacgcgttgactagtacatgaccacttga

SEQ ID NO: 46716 - DNA, 53 bp, Artificial Sequence; identical to SEQ ID NO: 22545
  Description of Artificial Sequence: Synthetic whey; inner sequence and 3'  sequence

SEQ ID NO: 46717 - DNA, 53 bp, Artificial Sequence; identical to SEQ ID NO: 22307
  Description of Artificial Sequence: Synthetic whey; inner sequence and 3'  sequence

SEQ ID NO: 46718 - DNA, 53 bp, Artificial Sequence; identical to SEQ ID NO: 22793
  Description of Artificial Sequence: Synthetic whey; inner sequence and 3'  sequence

SEQ ID NO: 46719 - DNA, 53 bp, Artificial Sequence; identical to SEQ ID NO: 30668
  Description of Artificial Sequence: Synthetic whey; inner sequence and 3'  sequence

SEQ ID NO: 46720 - DNA, 53 bp, Artificial Sequence; identical to SEQ ID NO: 30750
  Description of Artificial Sequence: Synthetic whey; inner sequence and 3'  sequence

SEQ ID NO: 46721 - DNA, 53 bp, Artificial Sequence; identical to SEQ ID NO: 22673
  Description of Artificial Sequence: Synthetic whey; inner sequence and 3'  sequence

SEQ ID NO: 46722 - DNA, 53 bp, Artificial Sequence
  Description of Artificial Sequence: Synthetic whey; inner sequence and 3'  sequence
cgacaacgaggcacgttacgtcacgtcacgttgactagtacatgaccacttga

SEQ ID NO: 46723 - DNA, 53 bp, Artificial Sequence
  Description of Artificial Sequence: Synthetic whey; inner sequence and 3'  sequence
ggccacagcgtacctcaacgtggacgttcattgactagtacatgaccacttga

SEQ ID NO: 46724 - DNA, 53 bp, Artificial Sequence
  Description of Artificial Sequence: Synthetic whey; inner sequence and 3'  sequence
ccatcgagtcactatcatgtgtgtcacgtattgactagtacatgaccacttga

SEQ ID NO: 46725 - DNA, 53 bp, Artificial Sequence; identical to SEQ ID NO: 22518
  Description of Artificial Sequence: Synthetic whey; inner sequence and 3'  sequence

SEQ ID NO: 46726 - DNA, 53 bp, Artificial Sequence
  Description of Artificial Sequence: Synthetic whey; inner sequence and 3'  sequence
cgtggcaacgtacgtacgtcaccttgcgcgttgactagtacatgaccacttga

SEQ ID NO: 46727 - DNA, 53 bp, Artificial Sequence; identical to SEQ ID NO: 22644
  Description of Artificial Sequence: Synthetic whey; inner sequence and 3'  sequence

SEQ ID NO: 46728 - DNA, 53 bp, Artificial Sequence
  Description of Artificial Sequence: Synthetic whey; inner sequence and 3'  sequence
ttcactgtgcctgaccgtcaagttgcggcattgactagtacatgaccacttga

SEQ ID NO: 46729 - DNA, 53 bp, Artificial Sequence; identical to SEQ ID NO: 2561
  Description of Artificial Sequence: Synthetic whey; inner sequence and 3'  sequence

SEQ ID NO: 46730 - DNA, 53 bp, Artificial Sequence; identical to SEQ ID NO: 30915
  Description of Artificial Sequence: Synthetic whey; inner sequence and 3'  sequence

SEQ ID NO: 46731 - DNA, 53 bp, Artificial Sequence; identical to SEQ ID NO: 22970
  Description of Artificial Sequence: Synthetic whey; inner sequence and 3'  sequence

SEQ ID NO: 46732 - DNA, 53 bp, Artificial Sequence
  Description of Artificial Sequence: Synthetic whey; inner sequence and 3'  sequence
gcgaacagcacgtacgtcactgcgcgtgccttgactagtacatgaccacttga

SEQ ID NO: 46733 - DNA, 53 bp, Artificial Sequence
  Description of Artificial Sequence: Synthetic whey; inner sequence and 3'  sequence
gtcactgtgcctgaccggcaagttgcggcattgactagtacatgaccacttga

SEQ ID NO: 46734 - DNA, 53 bp, Artificial Sequence; identical to SEQ ID NO: 18504
  Description of Artificial Sequence: Synthetic whey; inner sequence and 3'  sequence

SEQ ID NO: 46735 - DNA, 53 bp, Artificial Sequence; identical to SEQ ID NO: 6489
  Description of Artificial Sequence: Synthetic whey; inner sequence and 3'  sequence

SEQ ID NO: 46736 - DNA, 53 bp, Artificial Sequence
  Description of Artificial Sequence: Synthetic whey; inner sequence and 3'  sequence
gtcatgccatcccttagagtgtgacaggtattgactagtacatgaccacttga

SEQ ID NO: 46737 - DNA, 53 bp, Artificial Sequence
  Description of Artificial Sequence: Synthetic whey; inner sequence and 3'  sequence
gaccacagcgtacctcaacgtggacgtgcattgactagtacatgaccacttga

SEQ ID NO: 46738 - DNA, 53 bp, Artificial Sequence
  Description of Artificial Sequence: Synthetic whey; inner sequence and 3'  sequence
acgcatgcagaccgtaacgtacagtgcgcgttgactagtacatgaccacttga

SEQ ID NO: 46739 - DNA, 53 bp, Artificial Sequence
  Description of Artificial Sequence: Synthetic whey; inner sequence and 3'  sequence
acgtcacgcacagcgtcacgttccgatgcgttgactagtacatgaccacttga

SEQ ID NO: 46740 - DNA, 53 bp, Artificial Sequence
  Description of Artificial Sequence: Synthetic whey; inner sequence and 3'  sequence
catggcaacgacgcatggtacggcagcacgttgactagtacatgaccacttga

SEQ ID NO: 46741 - DNA, 53 bp, Artificial Sequence
  Description of Artificial Sequence: Synthetic whey; inner sequence and 3'  sequence
ggtacgcagtcacgcagcaacgtcgtcacgttgactagtacatgaccacttga

SEQ ID NO: 46742 - DNA, 53 bp, Artificial Sequence
  Description of Artificial Sequence: Synthetic whey; inner sequence and 3'  sequence
cgatacgtatcgcgtcgtccatccgtcacgttgactagtacatgaccacttga

SEQ ID NO: 46743 - DNA, 53 bp, Artificial Sequence; identical to SEQ ID NO: 22475
  Description of Artificial Sequence: Synthetic whey; inner sequence and 3'  sequence

SEQ ID NO: 46744 - DNA, 53 bp, Artificial Sequence
  Description of Artificial Sequence: Synthetic whey; inner sequence and 3'  sequence
ggacgcaacgtaacgtatcgtggccatgtgttgactagtacatgaccacttga

SEQ ID NO: 46745 - DNA, 53 bp, Artificial Sequence
  Description of Artificial Sequence: Synthetic whey; inner sequence and 3'  sequence
gtcactgtgcctgaccgtcaagttccggcattgactagtacatgaccacttga

SEQ ID NO: 46746 - DNA, 53 bp, Artificial Sequence; identical to SEQ ID NO: 22648
  Description of Artificial Sequence: Synthetic whey; inner sequence and 3'  sequence

SEQ ID NO: 46747 - DNA, 53 bp, Artificial Sequence; identical to SEQ ID NO: 22884
  Description of Artificial Sequence: Synthetic whey; inner sequence and 3'  sequence

SEQ ID NO: 46748 - DNA, 53 bp, Artificial Sequence; identical to SEQ ID NO: 30771
  Description of Artificial Sequence: Synthetic whey; inner sequence and 3'  sequence

SEQ ID NO: 46749 - DNA, 53 bp, Artificial Sequence; identical to SEQ ID NO: 22413
  Description of Artificial Sequence: Synthetic whey; inner sequence and 3'  sequence

SEQ ID NO: 46750 - DNA, 53 bp, Artificial Sequence; identical to SEQ ID NO: 30620
  Description of Artificial Sequence: Synthetic whey; inner sequence and 3'  sequence

SEQ ID NO: 46751 - DNA, 53 bp, Artificial Sequence
  Description of Artificial Sequence: Synthetic whey; inner sequence and 3'  sequence
cgtgccaacgtaatgccacgtcacctcacgttgactagtacatgaccacttga

SEQ ID NO: 46752 - DNA, 53 bp, Artificial Sequence
  Description of Artificial Sequence: Synthetic whey; inner sequence and 3'  sequence
ggacgcagcgtaacgttcgagtggcacgtattgactagtacatgaccacttga

SEQ ID NO: 46753 - DNA, 53 bp, Artificial Sequence
  Description of Artificial Sequence: Synthetic whey; inner sequence and 3'  sequence
cgtgacgtacgcaacacatcgtcctacgcattgactagtacatgaccacttga

SEQ ID NO: 46754 - DNA, 53 bp, Artificial Sequence; identical to SEQ ID NO: 18804
  Description of Artificial Sequence: Synthetic whey; inner sequence and 3'  sequence

SEQ ID NO: 46755 - DNA, 51 bp, Artificial Sequence; identical to SEQ ID NO: 22321
  Description of Artificial Sequence: Synthetic whey; inner sequence and 3'  sequence

SEQ ID NO: 46756 - DNA, 53 bp, Artificial Sequence; identical to SEQ ID NO: 22666
  Description of Artificial Sequence: Synthetic whey; inner sequence and 3'  sequence

SEQ ID NO: 46757 - DNA, 53 bp, Artificial Sequence; identical to SEQ ID NO: 2278
  Description of Artificial Sequence: Synthetic whey; inner sequence and 3'  sequence

SEQ ID NO: 46758 - DNA, 53 bp, Artificial Sequence
  Description of Artificial Sequence: Synthetic whey; inner sequence and 3'  sequence
acgatcagcacgcactacaacgtacgcacgttgactagtacatgaccacttga

SEQ ID NO: 46759 - DNA, 53 bp, Artificial Sequence; identical to SEQ ID NO: 6230
  Description of Artificial Sequence: Synthetic whey; inner sequence and 3'  sequence

SEQ ID NO: 46760 - DNA, 53 bp, Artificial Sequence; identical to SEQ ID NO: 2576
  Description of Artificial Sequence: Synthetic whey; inner sequence and 3'  sequence

SEQ ID NO: 46761 - DNA, 54 bp, Artificial Sequence
  Description of Artificial Sequence: Synthetic whey; inner sequence and 3'  sequence
acgatgcgtaccgatgcgtatgtcgtgcacattgactagtacatgaccacttga

SEQ ID NO: 46762 - DNA, 53 bp, Artificial Sequence; identical to SEQ ID NO: 18988
  Description of Artificial Sequence: Synthetic whey; inner sequence and 3'  sequence

SEQ ID NO: 46763 - DNA, 53 bp, Artificial Sequence; identical to SEQ ID NO: 2567
  Description of Artificial Sequence: Synthetic whey; inner sequence and 3'  sequence

SEQ ID NO: 46764 - DNA, 53 bp, Artificial Sequence; identical to SEQ ID NO: 7000
  Description of Artificial Sequence: Synthetic whey; inner sequence and 3'  sequence

SEQ ID NO: 46765 - DNA, 53 bp, Artificial Sequence
  Description of Artificial Sequence: Synthetic whey; inner sequence and 3'  sequence
cgatggcagaccgtgacgctacgtaacgcgttgactagtacatgaccacttga

SEQ ID NO: 46766 - DNA, 52 bp, Artificial Sequence
  Description of Artificial Sequence: Synthetic whey; inner sequence and 3'  sequence
cgtaccgcaagtgacgtgtccgtgccgtgttgactagtacatgaccacttga

SEQ ID NO: 46767 - DNA, 53 bp, Artificial Sequence
  Description of Artificial Sequence: Synthetic whey; inner sequence and 3'  sequence
gtacgcatcgtcccgtcatgtggttctgtattgactagtacatgaccacttga

SEQ ID NO: 46768 - DNA, 53 bp, Artificial Sequence
  Description of Artificial Sequence: Synthetic whey; inner sequence and 3'  sequence
aacgtgcgcgacgtaacgtatgcaccgtgcttgactagtacatgaccacttga

SEQ ID NO: 46769 - DNA, 53 bp, Artificial Sequence; identical to SEQ ID NO: 18457
  Description of Artificial Sequence: Synthetic whey; inner sequence and 3'  sequence

SEQ ID NO: 46770 - DNA, 53 bp, Artificial Sequence
  Description of Artificial Sequence: Synthetic whey; inner sequence and 3'  sequence
acgtcaacatgtcgcagttcgtaacgcacattgactagtacatgaccacttga

SEQ ID NO: 46771 - DNA, 53 bp, Artificial Sequence
  Description of Artificial Sequence: Synthetic whey; inner sequence and 3'  sequence
ggccacagcgtacctcaacgtggacgtacattgactagtacatgaccacttga

SEQ ID NO: 46772 - DNA, 53 bp, Artificial Sequence
  Description of Artificial Sequence: Synthetic whey; inner sequence and 3'  sequence
gtcactgtgcctgaacgtcaagttgcggcattgactagtacatgaccacttga

SEQ ID NO: 46773 - DNA, 53 bp, Artificial Sequence; identical to SEQ ID NO: 30984
  Description of Artificial Sequence: Synthetic whey; inner sequence and 3'  sequence

SEQ ID NO: 46774 - DNA, 53 bp, Artificial Sequence
  Description of Artificial Sequence: Synthetic whey; inner sequence and 3'  sequence
aggcacagcgcagtgtcacgttccgatgcgttgactagtacatgaccacttga

SEQ ID NO: 46775 - DNA, 53 bp, Artificial Sequence; identical to SEQ ID NO: 22690
  Description of Artificial Sequence: Synthetic whey; inner sequence and 3'  sequence

SEQ ID NO: 46776 - DNA, 53 bp, Artificial Sequence; identical to SEQ ID NO: 2253
  Description of Artificial Sequence: Synthetic whey; inner sequence and 3'  sequence

SEQ ID NO: 46777 - DNA, 53 bp, Artificial Sequence
  Description of Artificial Sequence: Synthetic whey; inner sequence and 3'  sequence
cgtgacgacggaacgtgcgtatggtacgcattgactagtacatgaccacttga

SEQ ID NO: 46778 - DNA, 53 bp, Artificial Sequence; identical to SEQ ID NO: 2883
  Description of Artificial Sequence: Synthetic whey; inner sequence and 3'  sequence

SEQ ID NO: 46779 - DNA, 53 bp, Artificial Sequence; identical to SEQ ID NO: 2943
  Description of Artificial Sequence: Synthetic whey; inner sequence and 3'  sequence

SEQ ID NO: 46780 - DNA, 53 bp, Artificial Sequence
  Description of Artificial Sequence: Synthetic whey; inner sequence and 3'  sequence
cgtgcgcaacgacatgtcactgactgcgcgttgactagtacatgaccacttga

SEQ ID NO: 46781 - DNA, 53 bp, Artificial Sequence
  Description of Artificial Sequence: Synthetic whey; inner sequence and 3'  sequence
ggacgcaacgtacagtatcgtggccatgtgttgactagtacatgaccacttga

SEQ ID NO: 46782 - DNA, 53 bp, Artificial Sequence
  Description of Artificial Sequence: Synthetic whey; inner sequence and 3'  sequence
gcgtacggaatggacgtcctgcgctgcacgttgactagtacatgaccacttga

SEQ ID NO: 46783 - DNA, 53 bp, Artificial Sequence; identical to SEQ ID NO: 30864
  Description of Artificial Sequence: Synthetic whey; inner sequence and 3'  sequence

SEQ ID NO: 46784 - DNA, 53 bp, Artificial Sequence; identical to SEQ ID NO: 10949
  Description of Artificial Sequence: Synthetic whey; inner sequence and 3'  sequence

SEQ ID NO: 46785 - DNA, 53 bp, Artificial Sequence; identical to SEQ ID NO: 2331
  Description of Artificial Sequence: Synthetic whey; inner sequence and 3'  sequence

SEQ ID NO: 46786 - DNA, 53 bp, Artificial Sequence; identical to SEQ ID NO: 2529
  Description of Artificial Sequence: Synthetic whey; inner sequence and 3'  sequence

SEQ ID NO: 46787 - DNA, 53 bp, Artificial Sequence
  Description of Artificial Sequence: Synthetic whey; inner sequence and 3'  sequence
gtcactgtgcctgaccgtcaagctgcggcattgactagtacatgaccacttga

SEQ ID NO: 46788 - DNA, 53 bp, Artificial Sequence; identical to SEQ ID NO: 22820
  Description of Artificial Sequence: Synthetic whey; inner sequence and 3'  sequence

SEQ ID NO: 46789 - DNA, 53 bp, Artificial Sequence; identical to SEQ ID NO: 10782
  Description of Artificial Sequence: Synthetic whey; inner sequence and 3'  sequence

SEQ ID NO: 46790 - DNA, 53 bp, Artificial Sequence; identical to SEQ ID NO: 2360
  Description of Artificial Sequence: Synthetic whey; inner sequence and 3'  sequence

SEQ ID NO: 46791 - DNA, 53 bp, Artificial Sequence; identical to SEQ ID NO: 42519
  Description of Artificial Sequence: Synthetic whey; inner sequence and 3'  sequence

SEQ ID NO: 46792 - DNA, 53 bp, Artificial Sequence; identical to SEQ ID NO: 10993
  Description of Artificial Sequence: Synthetic whey; inner sequence and 3'  sequence

SEQ ID NO: 46793 - DNA, 53 bp, Artificial Sequence; identical to SEQ ID NO: 18412
  Description of Artificial Sequence: Synthetic whey; inner sequence and 3'  sequence

SEQ ID NO: 46794 - DNA, 53 bp, Artificial Sequence
  Description of Artificial Sequence: Synthetic whey; inner sequence and 3'  sequence
gcgagacaacgcgaaccgttacgatgcacgttgactagtacatgaccacttga

SEQ ID NO: 46795 - DNA, 53 bp, Artificial Sequence; identical to SEQ ID NO: 10618
  Description of Artificial Sequence: Synthetic whey; inner sequence and 3'  sequence

SEQ ID NO: 46796 - DNA, 53 bp, Artificial Sequence
  Description of Artificial Sequence: Synthetic whey; inner sequence and 3'  sequence
acgtcacacgcgttgcatcgatgcgttgcgttgactagtacatgaccacttga

SEQ ID NO: 46797 - DNA, 53 bp, Artificial Sequence
  Description of Artificial Sequence: Synthetic whey; inner sequence and 3'  sequence
acgcaacgcaatgtacgcacatgatgcacgttgactagtacatgaccacttga

SEQ ID NO: 46798 - DNA, 53 bp, Artificial Sequence
  Description of Artificial Sequence: Synthetic whey; inner sequence and 3'  sequence
cgtgtgcagcacaaggacgtacgcactgccttgactagtacatgaccacttga

SEQ ID NO: 46799 - DNA, 53 bp, Artificial Sequence; identical to SEQ ID NO: 2531
  Description of Artificial Sequence: Synthetic whey; inner sequence and 3'  sequence

SEQ ID NO: 46800 - DNA, 53 bp, Artificial Sequence; identical to SEQ ID NO: 22661
  Description of Artificial Sequence: Synthetic whey; inner sequence and 3'  sequence

SEQ ID NO: 46801 - DNA, 53 bp, Artificial Sequence; identical to SEQ ID NO: 30964
  Description of Artificial Sequence: Synthetic whey; inner sequence and 3'  sequence

SEQ ID NO: 46802 - DNA, 53 bp, Artificial Sequence; identical to SEQ ID NO: 2563
  Description of Artificial Sequence: Synthetic whey; inner sequence and 3'  sequence

SEQ ID NO: 46803 - DNA, 53 bp, Artificial Sequence
  Description of Artificial Sequence: Synthetic whey; inner sequence and 3'  sequence
gtcactgtccctgaccgtcaagttgcggcattgactagtacatgaccacttga

SEQ ID NO: 46804 - DNA, 53 bp, Artificial Sequence
  Description of Artificial Sequence: Synthetic whey; inner sequence and 3'  sequence
cacgtacggatgcaacgtagcatgtgcgtattgactagtacatgaccacttga

SEQ ID NO: 46805 - DNA, 53 bp, Artificial Sequence
  Description of Artificial Sequence: Synthetic whey; inner sequence and 3'  sequence
acgatgcgacgtgccattgcgtacgatgcgttgactagtacatgaccacttga

SEQ ID NO: 46806 - DNA, 53 bp, Artificial Sequence; identical to SEQ ID NO: 2628
  Description of Artificial Sequence: Synthetic whey; inner sequence and 3'  sequence

SEQ ID NO: 46807 - DNA, 53 bp, Artificial Sequence; identical to SEQ ID NO: 2428
  Description of Artificial Sequence: Synthetic whey; inner sequence and 3'  sequence

SEQ ID NO: 46808 - DNA, 53 bp, Artificial Sequence; identical to SEQ ID NO: 30425
  Description of Artificial Sequence: Synthetic whey; inner sequence and 3'  sequence

SEQ ID NO: 46809 - DNA, 53 bp, Artificial Sequence; identical to SEQ ID NO: 2055
  Description of Artificial Sequence: Synthetic whey; inner sequence and 3'  sequence

SEQ ID NO: 46810 - DNA, 53 bp, Artificial Sequence; identical to SEQ ID NO: 34379
  Description of Artificial Sequence: Synthetic whey; inner sequence and 3'  sequence

SEQ ID NO: 46811 - DNA, 53 bp, Artificial Sequence; identical to SEQ ID NO: 2275
  Description of Artificial Sequence: Synthetic whey; inner sequence and 3'  sequence

SEQ ID NO: 46812 - DNA, 53 bp, Artificial Sequence; identical to SEQ ID NO: 14700
  Description of Artificial Sequence: Synthetic whey; inner sequence and 3'  sequence

SEQ ID NO: 46813 - DNA, 53 bp, Artificial Sequence; identical to SEQ ID NO: 14945
  Description of Artificial Sequence: Synthetic whey; inner sequence and 3'  sequence

SEQ ID NO: 46814 - DNA, 53 bp, Artificial Sequence; identical to SEQ ID NO: 22576
  Description of Artificial Sequence: Synthetic whey; inner sequence and 3'  sequence

SEQ ID NO: 46815 - DNA, 53 bp, Artificial Sequence; identical to SEQ ID NO: 22701
  Description of Artificial Sequence: Synthetic whey; inner sequence and 3'  sequence

SEQ ID NO: 46816 - DNA, 53 bp, Artificial Sequence
  Description of Artificial Sequence: Synthetic whey; inner sequence and 3'  sequence
cacgcaacgtacgatcgtagtgtcgttggcttgactagtacatgaccacttga

SEQ ID NO: 46817 - DNA, 53 bp, Artificial Sequence
  Description of Artificial Sequence: Synthetic whey; inner sequence and 3'  sequence
cgtaccgcaagtgacgtgtccgtgccgtgtttgactagtacatgaccacttga

SEQ ID NO: 46818 - DNA, 53 bp, Artificial Sequence; identical to SEQ ID NO: 2168
  Description of Artificial Sequence: Synthetic whey; inner sequence and 3'  sequence

SEQ ID NO: 46819 - DNA, 53 bp, Artificial Sequence
  Description of Artificial Sequence: Synthetic whey; inner sequence and 3'  sequence
cacgtcagacacatcgtccgttacgtcacgttgactagtacatgaccacttga

SEQ ID NO: 46820 - DNA, 53 bp, Artificial Sequence
  Description of Artificial Sequence: Synthetic whey; inner sequence and 3'  sequence
gcactactcgcaccctatcatgtaggcatgttgactagtacatgaccacttga

SEQ ID NO: 46821 - DNA, 53 bp, Artificial Sequence
  Description of Artificial Sequence: Synthetic whey; inner sequence and 3'  sequence
ccatcgcgtccctatcatgtgtgtcacgtattgactagtacatgaccacttga

SEQ ID NO: 46822 - DNA, 53 bp, Artificial Sequence; identical to SEQ ID NO: 15002
  Description of Artificial Sequence: Synthetic whey; inner sequence and 3'  sequence

SEQ ID NO: 46823 - DNA, 53 bp, Artificial Sequence; identical to SEQ ID NO: 22353
  Description of Artificial Sequence: Synthetic whey; inner sequence and 3'  sequence

SEQ ID NO: 46824 - DNA, 53 bp, Artificial Sequence; identical to SEQ ID NO: 30659
  Description of Artificial Sequence: Synthetic whey; inner sequence and 3'  sequence

SEQ ID NO: 46825 - DNA, 53 bp, Artificial Sequence
  Description of Artificial Sequence: Synthetic whey; inner sequence and 3'  sequence
gtcactgtgcttgaccgtcaagttgcggcattgactagtacatgaccacttga

SEQ ID NO: 46826 - DNA, 53 bp, Artificial Sequence; identical to SEQ ID NO: 2257
  Description of Artificial Sequence: Synthetic whey; inner sequence and 3'  sequence

SEQ ID NO: 46827 - DNA, 53 bp, Artificial Sequence; identical to SEQ ID NO: 2809
  Description of Artificial Sequence: Synthetic whey; inner sequence and 3'  sequence

SEQ ID NO: 46828 - DNA, 53 bp, Artificial Sequence; identical to SEQ ID NO: 2583
  Description of Artificial Sequence: Synthetic whey; inner sequence and 3'  sequence

SEQ ID NO: 46829 - DNA, 53 bp, Artificial Sequence; identical to SEQ ID NO: 30114
  Description of Artificial Sequence: Synthetic whey; inner sequence and 3'  sequence

SEQ ID NO: 46830 - DNA, 53 bp, Artificial Sequence
  Description of Artificial Sequence: Synthetic whey; inner sequence and 3'  sequence
gtcatgccaccccttcgagtgtgacaggtattgactagtacatgaccacttga

SEQ ID NO: 46831 - DNA, 53 bp, Artificial Sequence; identical to SEQ ID NO: 22692
  Description of Artificial Sequence: Synthetic whey; inner sequence and 3'  sequence

SEQ ID NO: 46832 - DNA, 53 bp, Artificial Sequence; identical to SEQ ID NO: 2311
  Description of Artificial Sequence: Synthetic whey; inner sequence and 3'  sequence

SEQ ID NO: 46833 - DNA, 53 bp, Artificial Sequence
  Description of Artificial Sequence: Synthetic whey; inner sequence and 3'  sequence
cgtgacagcatcgtacgtacggaccgcgcgttgactagtacatgaccacttga

SEQ ID NO: 46834 - DNA, 53 bp, Artificial Sequence
  Description of Artificial Sequence: Synthetic whey; inner sequence and 3'  sequence
ggacgcaacgaaccgtatcgtggccatgtattgactagtacatgaccacttga

SEQ ID NO: 46835 - DNA, 53 bp, Artificial Sequence
  Description of Artificial Sequence: Synthetic whey; inner sequence and 3'  sequence
gcacgactcgcaccctatcatgagggcatgttgactagtacatgaccacttga

SEQ ID NO: 46836 - DNA, 53 bp, Artificial Sequence; identical to SEQ ID NO: 38827
  Description of Artificial Sequence: Synthetic whey; inner sequence and 3'  sequence

SEQ ID NO: 46837 - DNA, 53 bp, Artificial Sequence
  Description of Artificial Sequence: Synthetic whey; inner sequence and 3'  sequence
gtcactgtgcctgaccgtcaagttgcggcgttgactagtacatgaccacttga

SEQ ID NO: 46838 - DNA, 53 bp, Artificial Sequence
  Description of Artificial Sequence: Synthetic whey; inner sequence and 3'  sequence
ggacgcaacgtaccgtatcgtggacatgtgttgactagtacatgaccacttga

SEQ ID NO: 46839 - DNA, 53 bp, Artificial Sequence
  Description of Artificial Sequence: Synthetic whey; inner sequence and 3'  sequence
gtcatgccatcccttcgagtgtgataggtattgactagtacatgaccacttga

SEQ ID NO: 46840 - DNA, 53 bp, Artificial Sequence; identical to SEQ ID NO: 22797
  Description of Artificial Sequence: Synthetic whey; inner sequence and 3'  sequence

SEQ ID NO: 46841 - DNA, 53 bp, Artificial Sequence
  Description of Artificial Sequence: Synthetic whey; inner sequence and 3'  sequence
ggacgcaacgtaccgtatcgtggccacgtgttgactagtacatgaccacttga

SEQ ID NO: 46842 - DNA, 53 bp, Artificial Sequence; identical to SEQ ID NO: 18612
  Description of Artificial Sequence: Synthetic whey; inner sequence and 3'  sequence

SEQ ID NO: 46843 - DNA, 53 bp, Artificial Sequence
  Description of Artificial Sequence: Synthetic whey; inner sequence and 3'  sequence
cgtgacgcgatggtgacgtaccttgccgtattgactagtacatgaccacttga

SEQ ID NO: 46844 - DNA, 53 bp, Artificial Sequence; identical to SEQ ID NO: 30737
  Description of Artificial Sequence: Synthetic whey; inner sequence and 3'  sequence

SEQ ID NO: 46845 - DNA, 53 bp, Artificial Sequence
  Description of Artificial Sequence: Synthetic whey; inner sequence and 3'  sequence
gcgcgaacgacctgcatgtacgttgacgcgttgactagtacatgaccacttga

SEQ ID NO: 46846 - DNA, 53 bp, Artificial Sequence
  Description of Artificial Sequence: Synthetic whey; inner sequence and 3'  sequence
cacgacgtacgtgacgctatgcactgcgtgttgactagtacatgaccacttga

SEQ ID NO: 46847 - DNA, 53 bp, Artificial Sequence; identical to SEQ ID NO: 22415
  Description of Artificial Sequence: Synthetic whey; inner sequence and 3'  sequence

SEQ ID NO: 46848 - DNA, 53 bp, Artificial Sequence; identical to SEQ ID NO: 22952
  Description of Artificial Sequence: Synthetic whey; inner sequence and 3'  sequence

SEQ ID NO: 46849 - DNA, 53 bp, Artificial Sequence
  Description of Artificial Sequence: Synthetic whey; inner sequence and 3'  sequence
cgtgcgagacgatgttggcgtgacgtcgcgttgactagtacatgaccacttga

SEQ ID NO: 46850 - DNA, 53 bp, Artificial Sequence; identical to SEQ ID NO: 2269
  Description of Artificial Sequence: Synthetic whey; inner sequence and 3'  sequence

SEQ ID NO: 46851 - DNA, 53 bp, Artificial Sequence; identical to SEQ ID NO: 10401
  Description of Artificial Sequence: Synthetic whey; inner sequence and 3'  sequence

SEQ ID NO: 46852 - DNA, 53 bp, Artificial Sequence; identical to SEQ ID NO: 2507
  Description of Artificial Sequence: Synthetic whey; inner sequence and 3'  sequence

SEQ ID NO: 46853 - DNA, 53 bp, Artificial Sequence
  Description of Artificial Sequence: Synthetic whey; inner sequence and 3'  sequence
gttacgcagtgacgcatcacgtacgccaccttgactagtacatgaccacttga

SEQ ID NO: 46854 - DNA, 53 bp, Artificial Sequence; identical to SEQ ID NO: 2039
  Description of Artificial Sequence: Synthetic whey; inner sequence and 3'  sequence

SEQ ID NO: 46855 - DNA, 53 bp, Artificial Sequence
  Description of Artificial Sequence: Synthetic whey; inner sequence and 3'  sequence
cgtgcacagtcacgttggcacatcgtcacattgactagtacatgaccacttga

SEQ ID NO: 46856 - DNA, 53 bp, Artificial Sequence
  Description of Artificial Sequence: Synthetic whey; inner sequence and 3'  sequence
gtcactgtacctgaccgtcaagttgcggcattgactagtacatgaccacttga

SEQ ID NO: 46857 - DNA, 53 bp, Artificial Sequence; identical to SEQ ID NO: 18703
  Description of Artificial Sequence: Synthetic whey; inner sequence and 3'  sequence

SEQ ID NO: 46858 - DNA, 53 bp, Artificial Sequence; identical to SEQ ID NO: 22913
  Description of Artificial Sequence: Synthetic whey; inner sequence and 3'  sequence

SEQ ID NO: 46859 - DNA, 53 bp, Artificial Sequence
  Description of Artificial Sequence: Synthetic whey; inner sequence and 3'  sequence
acgtgacgcagcgtagtatcgtactgcacattgactagtacatgaccacttga

SEQ ID NO: 46860 - DNA, 53 bp, Artificial Sequence; identical to SEQ ID NO: 2234
  Description of Artificial Sequence: Synthetic whey; inner sequence and 3'  sequence

SEQ ID NO: 46861 - DNA, 53 bp, Artificial Sequence; identical to SEQ ID NO: 30603
  Description of Artificial Sequence: Synthetic whey; inner sequence and 3'  sequence

SEQ ID NO: 46862 - DNA, 53 bp, Artificial Sequence; identical to SEQ ID NO: 18949
  Description of Artificial Sequence: Synthetic whey; inner sequence and 3'  sequence

SEQ ID NO: 46863 - DNA, 53 bp, Artificial Sequence; identical to SEQ ID NO: 2909
  Description of Artificial Sequence: Synthetic whey; inner sequence and 3'  sequence

SEQ ID NO: 46864 - DNA, 53 bp, Artificial Sequence
  Description of Artificial Sequence: Synthetic whey; inner sequence and 3'  sequence
cgtacggcaccacgcatacgtcacttcggcttgactagtacatgaccacttga

SEQ ID NO: 46865 - DNA, 53 bp, Artificial Sequence
  Description of Artificial Sequence: Synthetic whey; inner sequence and 3'  sequence
cgttacgcaacacaaacgtacgcatgcacgttgactagtacatgaccacttga

SEQ ID NO: 46866 - DNA, 53 bp, Artificial Sequence; identical to SEQ ID NO: 2756
  Description of Artificial Sequence: Synthetic whey; inner sequence and 3'  sequence

SEQ ID NO: 46867 - DNA, 53 bp, Artificial Sequence; identical to SEQ ID NO: 18966
  Description of Artificial Sequence: Synthetic whey; inner sequence and 3'  sequence

SEQ ID NO: 46868 - DNA, 53 bp, Artificial Sequence; identical to SEQ ID NO: 2120
  Description of Artificial Sequence: Synthetic whey; inner sequence and 3'  sequence

SEQ ID NO: 46869 - DNA, 53 bp, Artificial Sequence; identical to SEQ ID NO: 2292
  Description of Artificial Sequence: Synthetic whey; inner sequence and 3'  sequence

SEQ ID NO: 46870 - DNA, 53 bp, Artificial Sequence; identical to SEQ ID NO: 18979
  Description of Artificial Sequence: Synthetic whey; inner sequence and 3'  sequence

SEQ ID NO: 46871 - DNA, 53 bp, Artificial Sequence; identical to SEQ ID NO: 22669
  Description of Artificial Sequence: Synthetic whey; inner sequence and 3'  sequence

SEQ ID NO: 46872 - DNA, 53 bp, Artificial Sequence; identical to SEQ ID NO: 18655
  Description of Artificial Sequence: Synthetic whey; inner sequence and 3'  sequence

SEQ ID NO: 46873 - DNA, 53 bp, Artificial Sequence
  Description of Artificial Sequence: Synthetic whey; inner sequence and 3'  sequence
cgtacggtacggcgatggaggtacgtcgcgttgactagtacatgaccacttga

SEQ ID NO: 46874 - DNA, 53 bp, Artificial Sequence
  Description of Artificial Sequence: Synthetic whey; inner sequence and 3'  sequence
ggccacagcgtacctcaacgtggacgtggattgactagtacatgaccacttga

SEQ ID NO: 46875 - DNA, 53 bp, Artificial Sequence; identical to SEQ ID NO: 22598
  Description of Artificial Sequence: Synthetic whey; inner sequence and 3'  sequence

SEQ ID NO: 46876 - DNA, 53 bp, Artificial Sequence; identical to SEQ ID NO: 30412
  Description of Artificial Sequence: Synthetic whey; inner sequence and 3'  sequence

SEQ ID NO: 46877 - DNA, 53 bp, Artificial Sequence; identical to SEQ ID NO: 22668
  Description of Artificial Sequence: Synthetic whey; inner sequence and 3'  sequence

SEQ ID NO: 46878 - DNA, 53 bp, Artificial Sequence
  Description of Artificial Sequence: Synthetic whey; inner sequence and 3'  sequence
ggacgcagcgtaccgtatcgtggccatgtgttgactagtacatgaccacttga

SEQ ID NO: 46879 - DNA, 53 bp, Artificial Sequence
  Description of Artificial Sequence: Synthetic whey; inner sequence and 3'  sequence
cgtgtgcgcaacgtgacacggtccttcgcattgactagtacatgaccacttga

SEQ ID NO: 46880 - DNA, 53 bp, Artificial Sequence
  Description of Artificial Sequence: Synthetic whey; inner sequence and 3'  sequence
ccatcgcgtcactataatgtgtgtcacgtattgactagtacatgaccacttga

SEQ ID NO: 46881 - DNA, 53 bp, Artificial Sequence
  Description of Artificial Sequence: Synthetic whey; inner sequence and 3'  sequence
cgtgtacgacgcgacaacgtgcctgccgtgttgactagtacatgaccacttga

SEQ ID NO: 46882 - DNA, 53 bp, Artificial Sequence; identical to SEQ ID NO: 2085
  Description of Artificial Sequence: Synthetic whey; inner sequence and 3'  sequence

SEQ ID NO: 46883 - DNA, 53 bp, Artificial Sequence
  Description of Artificial Sequence: Synthetic whey; inner sequence and 3'  sequence
acgtcacacgcacaggtacgttgtggtacgttgactagtacatgaccacttga

SEQ ID NO: 46884 - DNA, 53 bp, Artificial Sequence
  Description of Artificial Sequence: Synthetic whey; inner sequence and 3'  sequence
acgtcacaacgcagcgtccgttcgtacggtttgactagtacatgaccacttga

SEQ ID NO: 46885 - DNA, 53 bp, Artificial Sequence
  Description of Artificial Sequence: Synthetic whey; inner sequence and 3'  sequence
gtcactctgcctgaccgtcaagttgcggcattgactagtacatgaccacttga

SEQ ID NO: 46886 - DNA, 53 bp, Artificial Sequence
  Description of Artificial Sequence: Synthetic whey; inner sequence and 3'  sequence
tgtgcacacaccgtatgtcctcacgtcacgttgactagtacatgaccacttga

SEQ ID NO: 46887 - DNA, 53 bp, Artificial Sequence; identical to SEQ ID NO: 30557
  Description of Artificial Sequence: Synthetic whey; inner sequence and 3'  sequence

SEQ ID NO: 46888 - DNA, 53 bp, Artificial Sequence
  Description of Artificial Sequence: Synthetic whey; inner sequence and 3'  sequence
cgtgcgacagtacgacgagatgtgcgtgtcttgactagtacatgaccacttga

SEQ ID NO: 46889 - DNA, 53 bp, Artificial Sequence
  Description of Artificial Sequence: Synthetic whey; inner sequence and 3'  sequence
gcgatgtcgcaacgatgtacggtctgcacgttgactagtacatgaccacttga

SEQ ID NO: 46890 - DNA, 53 bp, Artificial Sequence
  Description of Artificial Sequence: Synthetic whey; inner sequence and 3'  sequence
acgtcacaacgcgtgtcgtccgttcgcgccttgactagtacatgaccacttga

SEQ ID NO: 46891 - DNA, 53 bp, Artificial Sequence
  Description of Artificial Sequence: Synthetic whey; inner sequence and 3'  sequence
cgatcacgatgcgaacacatggcctgcagcttgactagtacatgaccacttga

SEQ ID NO: 46892 - DNA, 53 bp, Artificial Sequence; identical to SEQ ID NO: 30595
  Description of Artificial Sequence: Synthetic whey; inner sequence and 3'  sequence

SEQ ID NO: 46893 - DNA, 53 bp, Artificial Sequence; identical to SEQ ID NO: 2317
  Description of Artificial Sequence: Synthetic whey; inner sequence and 3'  sequence

SEQ ID NO: 46894 - DNA, 53 bp, Artificial Sequence
  Description of Artificial Sequence: Synthetic whey; inner sequence and 3'  sequence
ggacgcaacgtaccgaatcgtggccatgtgttgactagtacatgaccacttga

SEQ ID NO: 46895 - DNA, 53 bp, Artificial Sequence
  Description of Artificial Sequence: Synthetic whey; inner sequence and 3'  sequence
gtcactgtgcccgaccgtcaagttgcggcattgactagtacatgaccacttga

SEQ ID NO: 46896 - DNA, 53 bp, Artificial Sequence; identical to SEQ ID NO: 34136
  Description of Artificial Sequence: Synthetic whey; inner sequence and 3'  sequence

SEQ ID NO: 46897 - DNA, 53 bp, Artificial Sequence; identical to SEQ ID NO: 2179
  Description of Artificial Sequence: Synthetic whey; inner sequence and 3'  sequence

SEQ ID NO: 46898 - DNA, 53 bp, Artificial Sequence
  Description of Artificial Sequence: Synthetic whey; inner sequence and 3'  sequence
gcgttggcgacgagtgcgtgacgttacgcgttgactagtacatgaccacttga

SEQ ID NO: 46899 - DNA, 53 bp, Artificial Sequence; identical to SEQ ID NO: 22736
  Description of Artificial Sequence: Synthetic whey; inner sequence and 3'  sequence

SEQ ID NO: 46900 - DNA, 53 bp, Artificial Sequence
  Description of Artificial Sequence: Synthetic whey; inner sequence and 3'  sequence
gcgtggcgtaacgcagcgtgtggcatcgcgttgactagtacatgaccacttga

SEQ ID NO: 46901 - DNA, 53 bp, Artificial Sequence
  Description of Artificial Sequence: Synthetic whey; inner sequence and 3'  sequence
tgtgcgaaacggaccgcatgttacgtcacattgactagtacatgaccacttga

SEQ ID NO: 46902 - DNA, 53 bp, Artificial Sequence
  Description of Artificial Sequence: Synthetic whey; inner sequence and 3'  sequence
cgtgatgcgtcacgtcacattcggcctgtcttgactagtacatgaccacttga

SEQ ID NO: 46903 - DNA, 53 bp, Artificial Sequence
  Description of Artificial Sequence: Synthetic whey; inner sequence and 3'  sequence
ggacgcaacttaccgtatcgtggccatgtgttgactagtacatgaccacttga

SEQ ID NO: 46904 - DNA, 53 bp, Artificial Sequence; identical to SEQ ID NO: 22553
  Description of Artificial Sequence: Synthetic whey; inner sequence and 3'  sequence

SEQ ID NO: 46905 - DNA, 53 bp, Artificial Sequence
  Description of Artificial Sequence: Synthetic whey; inner sequence and 3'  sequence
gtcactgtgcctgaccgtcaagttgccgcattgactagtacatgaccacttga

SEQ ID NO: 46906 - DNA, 53 bp, Artificial Sequence; identical to SEQ ID NO: 2603
  Description of Artificial Sequence: Synthetic whey; inner sequence and 3'  sequence

SEQ ID NO: 46907 - DNA, 53 bp, Artificial Sequence
  Description of Artificial Sequence: Synthetic whey; inner sequence and 3'  sequence
gcacgaatcgcaccctatcatgtaggcatgttgactagtacatgaccacttga

SEQ ID NO: 46908 - DNA, 53 bp, Artificial Sequence
  Description of Artificial Sequence: Synthetic whey; inner sequence and 3'  sequence
acgcaacgacgctacgatacgtgctgtacgttgactagtacatgaccacttga

SEQ ID NO: 46909 - DNA, 53 bp, Artificial Sequence; identical to SEQ ID NO: 2497
  Description of Artificial Sequence: Synthetic whey; inner sequence and 3'  sequence

SEQ ID NO: 46910 - DNA, 53 bp, Artificial Sequence
  Description of Artificial Sequence: Synthetic whey; inner sequence and 3'  sequence
cgtcacgccgaggcacgtccttccgccacgttgactagtacatgaccacttga

SEQ ID NO: 46911 - DNA, 53 bp, Artificial Sequence; identical to SEQ ID NO: 2905
  Description of Artificial Sequence: Synthetic whey; inner sequence and 3'  sequence

SEQ ID NO: 46912 - DNA, 53 bp, Artificial Sequence; identical to SEQ ID NO: 2956
  Description of Artificial Sequence: Synthetic whey; inner sequence and 3'  sequence

SEQ ID NO: 46913 - DNA, 53 bp, Artificial Sequence; identical to SEQ ID NO: 30555
  Description of Artificial Sequence: Synthetic whey; inner sequence and 3'  sequence

SEQ ID NO: 46914 - DNA, 53 bp, Artificial Sequence; identical to SEQ ID NO: 6807
  Description of Artificial Sequence: Synthetic whey; inner sequence and 3'  sequence

SEQ ID NO: 46915 - DNA, 53 bp, Artificial Sequence; identical to SEQ ID NO: 22343
  Description of Artificial Sequence: Synthetic whey; inner sequence and 3'  sequence

SEQ ID NO: 46916 - DNA, 53 bp, Artificial Sequence
  Description of Artificial Sequence: Synthetic whey; inner sequence and 3'  sequence
gtcactgtgcctgaccgtcaagttgcggccttgactagtacatgaccacttga

SEQ ID NO: 46917 - DNA, 53 bp, Artificial Sequence
  Description of Artificial Sequence: Synthetic whey; inner sequence and 3'  sequence
ggacgcaacgtaccgtatcgttgccatgtgttgactagtacatgaccacttga

SEQ ID NO: 46918 - DNA, 53 bp, Artificial Sequence
  Description of Artificial Sequence: Synthetic whey; inner sequence and 3'  sequence
gtcactgggcctgaccgtcaagttgcggcattgactagtacatgaccacttga

SEQ ID NO: 46919 - DNA, 53 bp, Artificial Sequence; identical to SEQ ID NO: 30910
  Description of Artificial Sequence: Synthetic whey; inner sequence and 3'  sequence

SEQ ID NO: 46920 - DNA, 53 bp, Artificial Sequence
  Description of Artificial Sequence: Synthetic whey; inner sequence and 3'  sequence
ttacgcatcgtcccgtcatgtggttccgtattgactagtacatgaccacttga

SEQ ID NO: 46921 - DNA, 53 bp, Artificial Sequence; identical to SEQ ID NO: 22367
  Description of Artificial Sequence: Synthetic whey; inner sequence and 3'  sequence

SEQ ID NO: 46922 - DNA, 53 bp, Artificial Sequence
  Description of Artificial Sequence: Synthetic whey; inner sequence and 3'  sequence
gtcatgccatccctccgagtgtgacaggtattgactagtacatgaccacttga

SEQ ID NO: 46923 - DNA, 53 bp, Artificial Sequence
  Description of Artificial Sequence: Synthetic whey; inner sequence and 3'  sequence
cgtacgcaacgtgcacgactgtcctgtgccttgactagtacatgaccacttga

SEQ ID NO: 46924 - DNA, 53 bp, Artificial Sequence
  Description of Artificial Sequence: Synthetic whey; inner sequence and 3'  sequence
gcacgactcgcaccctctcatgtaggcatgttgactagtacatgaccacttga

SEQ ID NO: 46925 - DNA, 53 bp, Artificial Sequence; identical to SEQ ID NO: 22388
  Description of Artificial Sequence: Synthetic whey; inner sequence and 3'  sequence

SEQ ID NO: 46926 - DNA, 53 bp, Artificial Sequence
  Description of Artificial Sequence: Synthetic whey; inner sequence and 3'  sequence
gcactgcacgcaccctctcatgtaggcatgttgactagtacatgaccacttga

SEQ ID NO: 46927 - DNA, 53 bp, Artificial Sequence; identical to SEQ ID NO: 14827
  Description of Artificial Sequence: Synthetic whey; inner sequence and 3'  sequence

SEQ ID NO: 46928 - DNA, 53 bp, Artificial Sequence; identical to SEQ ID NO: 18878
  Description of Artificial Sequence: Synthetic whey; inner sequence and 3'  sequence

SEQ ID NO: 46929 - DNA, 53 bp, Artificial Sequence; identical to SEQ ID NO: 2245
  Description of Artificial Sequence: Synthetic whey; inner sequence and 3'  sequence

SEQ ID NO: 46930 - DNA, 53 bp, Artificial Sequence; identical to SEQ ID NO: 14767
  Description of Artificial Sequence: Synthetic whey; inner sequence and 3'  sequence

SEQ ID NO: 46931 - DNA, 53 bp, Artificial Sequence
  Description of Artificial Sequence: Synthetic whey; inner sequence and 3'  sequence
cgatgcgcagtcaggcataggtacgacacattgactagtacatgaccacttga

SEQ ID NO: 46932 - DNA, 53 bp, Artificial Sequence
  Description of Artificial Sequence: Synthetic whey; inner sequence and 3'  sequence
cgtgcgcagaacgtgactgtcgtgcttggcttgactagtacatgaccacttga

SEQ ID NO: 46933 - DNA, 53 bp, Artificial Sequence; identical to SEQ ID NO: 2840
  Description of Artificial Sequence: Synthetic whey; inner sequence and 3'  sequence

SEQ ID NO: 46934 - DNA, 53 bp, Artificial Sequence
  Description of Artificial Sequence: Synthetic whey; inner sequence and 3'  sequence
ccatcgcgtcactatcatgtgtgtcacttattgactagtacatgaccacttga

SEQ ID NO: 46935 - DNA, 53 bp, Artificial Sequence
  Description of Artificial Sequence: Synthetic whey; inner sequence and 3'  sequence
ggacgcagcgtaccgttcgagtggtacgtattgactagtacatgaccacttga

SEQ ID NO: 46936 - DNA, 53 bp, Artificial Sequence
  Description of Artificial Sequence: Synthetic whey; inner sequence and 3'  sequence
acgtcacgatgcataacgtccttgtgcgcattgactagtacatgaccacttga

SEQ ID NO: 46937 - DNA, 53 bp, Artificial Sequence
  Description of Artificial Sequence: Synthetic whey; inner sequence and 3'  sequence
ggacgcaacgtaccgtatcatgaggccatgttgactagtacatgaccacttga

SEQ ID NO: 46938 - DNA, 53 bp, Artificial Sequence
  Description of Artificial Sequence: Synthetic whey; inner sequence and 3'  sequence
gtcactttgcctgaccgtcaagttgcggcattgactagtacatgaccacttga

SEQ ID NO: 46939 - DNA, 53 bp, Artificial Sequence
  Description of Artificial Sequence: Synthetic whey; inner sequence and 3'  sequence
ggacgcaacgtaccgtatcgtgaccatgtgttgactagtacatgaccacttga

SEQ ID NO: 46940 - DNA, 53 bp, Artificial Sequence; identical to SEQ ID NO: 30195
  Description of Artificial Sequence: Synthetic whey; inner sequence and 3'  sequence

SEQ ID NO: 46941 - DNA, 53 bp, Artificial Sequence
  Description of Artificial Sequence: Synthetic whey; inner sequence and 3'  sequence
cgatgcacgatgcgacactgtcacgttgcgttgactagtacatgaccacttga

SEQ ID NO: 46942 - DNA, 53 bp, Artificial Sequence
  Description of Artificial Sequence: Synthetic whey; inner sequence and 3'  sequence
ccatcgcgtcactatcatgtgtgtcatgtattgactagtacatgaccacttga

SEQ ID NO: 46943 - DNA, 53 bp, Artificial Sequence; identical to SEQ ID NO: 30818
  Description of Artificial Sequence: Synthetic whey; inner sequence and 3'  sequence

SEQ ID NO: 46944 - DNA, 53 bp, Artificial Sequence; identical to SEQ ID NO: 22962
  Description of Artificial Sequence: Synthetic whey; inner sequence and 3'  sequence

SEQ ID NO: 46945 - DNA, 53 bp, Artificial Sequence
  Description of Artificial Sequence: Synthetic whey; inner sequence and 3'  sequence
ggccacagcgtacctcaacgtggacgtgaattgactagtacatgaccacttga

SEQ ID NO: 46946 - DNA, 53 bp, Artificial Sequence; identical to SEQ ID NO: 2159
  Description of Artificial Sequence: Synthetic whey; inner sequence and 3'  sequence

SEQ ID NO: 46947 - DNA, 53 bp, Artificial Sequence
  Description of Artificial Sequence: Synthetic whey; inner sequence and 3'  sequence
ggacgcaacgtaacgtatcgtggccatgtattgactagtacatgaccacttga

SEQ ID NO: 46948 - DNA, 53 bp, Artificial Sequence; identical to SEQ ID NO: 18692
  Description of Artificial Sequence: Synthetic whey; inner sequence and 3'  sequence

SEQ ID NO: 46949 - DNA, 53 bp, Artificial Sequence
  Description of Artificial Sequence: Synthetic whey; inner sequence and 3'  sequence
ccatcgcgtcactgtcatgtgtgtcacgtattgactagtacatgaccacttga

SEQ ID NO: 46950 - DNA, 48 bp, Artificial Sequence; identical to SEQ ID NO: 22136
  Description of Artificial Sequence: Synthetic whey; inner sequence and 3'  sequence

SEQ ID NO: 46951 - DNA, 53 bp, Artificial Sequence
  Description of Artificial Sequence: Synthetic whey; inner sequence and 3'  sequence
cgtacgcatcgagctgcacgtgtcgtcacgttgactagtacatgaccacttga

SEQ ID NO: 46952 - DNA, 53 bp, Artificial Sequence
  Description of Artificial Sequence: Synthetic whey; inner sequence and 3'  sequence
acgtcacaacctcacgttggctagcgcggtttgactagtacatgaccacttga

SEQ ID NO: 46953 - DNA, 53 bp, Artificial Sequence
  Description of Artificial Sequence: Synthetic whey; inner sequence and 3'  sequence
catgtacgcactgtcaccttgcacgtcacgttgactagtacatgaccacttga

SEQ ID NO: 46954 - DNA, 53 bp, Artificial Sequence; identical to SEQ ID NO: 22534
  Description of Artificial Sequence: Synthetic whey; inner sequence and 3'  sequence

SEQ ID NO: 46955 - DNA, 53 bp, Artificial Sequence; identical to SEQ ID NO: 2569
  Description of Artificial Sequence: Synthetic whey; inner sequence and 3'  sequence

SEQ ID NO: 46956 - DNA, 53 bp, Artificial Sequence
  Description of Artificial Sequence: Synthetic whey; inner sequence and 3'  sequence
gtcatgccattccttcgagtgtgacaggtattgactagtacatgaccacttga

SEQ ID NO: 46957 - DNA, 53 bp, Artificial Sequence; identical to SEQ ID NO: 22807
  Description of Artificial Sequence: Synthetic whey; inner sequence and 3'  sequence

SEQ ID NO: 46958 - DNA, 53 bp, Artificial Sequence
  Description of Artificial Sequence: Synthetic whey; inner sequence and 3'  sequence
tgtgacgcacaggaggacgtacgctgcacgttgactagtacatgaccacttga

SEQ ID NO: 46959 - DNA, 53 bp, Artificial Sequence; identical to SEQ ID NO: 14936
  Description of Artificial Sequence: Synthetic whey; inner sequence and 3'  sequence

SEQ ID NO: 46960 - DNA, 53 bp, Artificial Sequence; identical to SEQ ID NO: 34802
  Description of Artificial Sequence: Synthetic whey; inner sequence and 3'  sequence

SEQ ID NO: 46961 - DNA, 53 bp, Artificial Sequence
  Description of Artificial Sequence: Synthetic whey; inner sequence and 3'  sequence
ggccacagcgtacctcaacgtggacgcgtattgactagtacatgaccacttga

SEQ ID NO: 46962 - DNA, 53 bp, Artificial Sequence; identical to SEQ ID NO: 18408
  Description of Artificial Sequence: Synthetic whey; inner sequence and 3'  sequence

SEQ ID NO: 46963 - DNA, 53 bp, Artificial Sequence
  Description of Artificial Sequence: Synthetic whey; inner sequence and 3'  sequence
gtacgcatcgtcccgtcatgtggttccgtcttgactagtacatgaccacttga

SEQ ID NO: 46964 - DNA, 53 bp, Artificial Sequence; identical to SEQ ID NO: 2147
  Description of Artificial Sequence: Synthetic whey; inner sequence and 3'  sequence

SEQ ID NO: 46965 - DNA, 53 bp, Artificial Sequence; identical to SEQ ID NO: 10769
  Description of Artificial Sequence: Synthetic whey; inner sequence and 3'  sequence

SEQ ID NO: 46966 - DNA, 53 bp, Artificial Sequence
  Description of Artificial Sequence: Synthetic whey; inner sequence and 3'  sequence
cacgtcaggcagatggacgcatacgacacgttgactagtacatgaccacttga

SEQ ID NO: 46967 - DNA, 53 bp, Artificial Sequence
  Description of Artificial Sequence: Synthetic whey; inner sequence and 3'  sequence
gcacgactcgcacactatcatgtaggcatgttgactagtacatgaccacttga

SEQ ID NO: 46968 - DNA, 53 bp, Artificial Sequence; identical to SEQ ID NO: 18803
  Description of Artificial Sequence: Synthetic whey; inner sequence and 3'  sequence

SEQ ID NO: 46969 - DNA, 53 bp, Artificial Sequence; identical to SEQ ID NO: 2101
  Description of Artificial Sequence: Synthetic whey; inner sequence and 3'  sequence

SEQ ID NO: 46970 - DNA, 53 bp, Artificial Sequence
  Description of Artificial Sequence: Synthetic whey; inner sequence and 3'  sequence
gtacgcatcgtccagtcatgtggttccgtattgactagtacatgaccacttga

SEQ ID NO: 46971 - DNA, 53 bp, Artificial Sequence
  Description of Artificial Sequence: Synthetic whey; inner sequence and 3'  sequence
gcacgactcgcaccctgtcatgaggccatgttgactagtacatgaccacttga

SEQ ID NO: 46972 - DNA, 53 bp, Artificial Sequence
  Description of Artificial Sequence: Synthetic whey; inner sequence and 3'  sequence
gcgtcacacagcagcgtgttacgtcctgccttgactagtacatgaccacttga

SEQ ID NO: 46973 - DNA, 53 bp, Artificial Sequence; identical to SEQ ID NO: 34484
  Description of Artificial Sequence: Synthetic whey; inner sequence and 3'  sequence

SEQ ID NO: 46974 - DNA, 53 bp, Artificial Sequence; identical to SEQ ID NO: 2091
  Description of Artificial Sequence: Synthetic whey; inner sequence and 3'  sequence

SEQ ID NO: 46975 - DNA, 53 bp, Artificial Sequence
  Description of Artificial Sequence: Synthetic whey; inner sequence and 3'  sequence
gtcattccgcatcccacacgtgggcacgtattgactagtacatgaccacttga

SEQ ID NO: 46976 - DNA, 53 bp, Artificial Sequence; identical to SEQ ID NO: 30744
  Description of Artificial Sequence: Synthetic whey; inner sequence and 3'  sequence

SEQ ID NO: 46977 - DNA, 53 bp, Artificial Sequence
  Description of Artificial Sequence: Synthetic whey; inner sequence and 3'  sequence
cgtggcacgtcacgcatgatgcacttcggtttgactagtacatgaccacttga

SEQ ID NO: 46978 - DNA, 53 bp, Artificial Sequence
  Description of Artificial Sequence: Synthetic whey; inner sequence and 3'  sequence
cgtgatggcgaacgtgtactgcgacatgccttgactagtacatgaccacttga

SEQ ID NO: 46979 - DNA, 53 bp, Artificial Sequence
  Description of Artificial Sequence: Synthetic whey; inner sequence and 3'  sequence
gtcacgccatcccttcgagtgtgacaggtattgactagtacatgaccacttga

SEQ ID NO: 46980 - DNA, 53 bp, Artificial Sequence; identical to SEQ ID NO: 2653
  Description of Artificial Sequence: Synthetic whey; inner sequence and 3'  sequence

SEQ ID NO: 46981 - DNA, 53 bp, Artificial Sequence
  Description of Artificial Sequence: Synthetic whey; inner sequence and 3'  sequence
gtcatgcaatcccttcgagtgtgacaggtattgactagtacatgaccacttga

SEQ ID NO: 46982 - DNA, 53 bp, Artificial Sequence
  Description of Artificial Sequence: Synthetic whey; inner sequence and 3'  sequence
gtcatcccatcccttcgagtgtgacaggtattgactagtacatgaccacttga

SEQ ID NO: 46983 - DNA, 53 bp, Artificial Sequence
  Description of Artificial Sequence: Synthetic whey; inner sequence and 3'  sequence
gcacgcaacgtaccgtatcgtggccatgtgttgactagtacatgaccacttga

SEQ ID NO: 46984 - DNA, 53 bp, Artificial Sequence; identical to SEQ ID NO: 2448
  Description of Artificial Sequence: Synthetic whey; inner sequence and 3'  sequence

SEQ ID NO: 46985 - DNA, 53 bp, Artificial Sequence
  Description of Artificial Sequence: Synthetic whey; inner sequence and 3'  sequence
ggacgcaacgtaccgtcatgtggttccgtattgactagtacatgaccacttga

SEQ ID NO: 46986 - DNA, 53 bp, Artificial Sequence; identical to SEQ ID NO: 22574
  Description of Artificial Sequence: Synthetic whey; inner sequence and 3'  sequence

SEQ ID NO: 46987 - DNA, 53 bp, Artificial Sequence; identical to SEQ ID NO: 18695
  Description of Artificial Sequence: Synthetic whey; inner sequence and 3'  sequence

SEQ ID NO: 46988 - DNA, 53 bp, Artificial Sequence; identical to SEQ ID NO: 2102
  Description of Artificial Sequence: Synthetic whey; inner sequence and 3'  sequence

SEQ ID NO: 46989 - DNA, 53 bp, Artificial Sequence
  Description of Artificial Sequence: Synthetic whey; inner sequence and 3'  sequence
cgtgcaacgcgagctgcgacgtacgacacgttgactagtacatgaccacttga

SEQ ID NO: 46990 - DNA, 53 bp, Artificial Sequence; identical to SEQ ID NO: 2788
  Description of Artificial Sequence: Synthetic whey; inner sequence and 3'  sequence

SEQ ID NO: 46991 - DNA, 53 bp, Artificial Sequence
  Description of Artificial Sequence: Synthetic whey; inner sequence and 3'  sequence
ggacgcaacgtaccgtatcgtggctatgtgttgactagtacatgaccacttga

SEQ ID NO: 46992 - DNA, 53 bp, Artificial Sequence
  Description of Artificial Sequence: Synthetic whey; inner sequence and 3'  sequence
gtcactgtgcctgaccatcaagttgcggcattgactagtacatgaccacttga

SEQ ID NO: 46993 - DNA, 53 bp, Artificial Sequence
  Description of Artificial Sequence: Synthetic whey; inner sequence and 3'  sequence
gcaacgcgaggacgtactgctgcctacacgttgactagtacatgaccacttga

SEQ ID NO: 46994 - DNA, 53 bp, Artificial Sequence
  Description of Artificial Sequence: Synthetic whey; inner sequence and 3'  sequence
gcgctaggcgtgacgtacacatgctgcacgttgactagtacatgaccacttga

SEQ ID NO: 46995 - DNA, 53 bp, Artificial Sequence; identical to SEQ ID NO: 10763
  Description of Artificial Sequence: Synthetic whey; inner sequence and 3'  sequence

SEQ ID NO: 46996 - DNA, 53 bp, Artificial Sequence
  Description of Artificial Sequence: Synthetic whey; inner sequence and 3'  sequence
cacgtacagtgaggcgtacctgcatgcgcattgactagtacatgaccacttga

SEQ ID NO: 46997 - DNA, 53 bp, Artificial Sequence
  Description of Artificial Sequence: Synthetic whey; inner sequence and 3'  sequence
cgacatgagcacggtatgcctcactgcacgttgactagtacatgaccacttga

SEQ ID NO: 46998 - DNA, 53 bp, Artificial Sequence
  Description of Artificial Sequence: Synthetic whey; inner sequence and 3'  sequence
cgtgcacgaggacgacgaacgcactacgcattgactagtacatgaccacttga

SEQ ID NO: 46999 - DNA, 53 bp, Artificial Sequence
  Description of Artificial Sequence: Synthetic whey; inner sequence and 3'  sequence
agccacagcgtacctcaacgtggacgtgcattgactagtacatgaccacttga

SEQ ID NO: 47000 - DNA, 53 bp, Artificial Sequence
  Description of Artificial Sequence: Synthetic whey; inner sequence and 3'  sequence
tcgacggcaaggtgaggcacgtgcatcgcgttgactagtacatgaccacttga

SEQ ID NO: 47001 - DNA, 53 bp, Artificial Sequence
  Description of Artificial Sequence: Synthetic whey; inner sequence and 3'  sequence
ggactcaacgtaccgtatcgtggccatgtattgactagtacatgaccacttga

SEQ ID NO: 47002 - DNA, 53 bp, Artificial Sequence; identical to SEQ ID NO: 34341
  Description of Artificial Sequence: Synthetic whey; inner sequence and 3'  sequence

SEQ ID NO: 47003 - DNA, 76 bp, Artificial Sequence; identical to SEQ ID NO: 3004
  Description of Artificial Sequence: Synthetic whey; 5' sequence + inner sequence + 3'  sequence

SEQ ID NO: 47004 - DNA, 76 bp, Artificial Sequence; identical to SEQ ID NO: 3021
  Description of Artificial Sequence: Synthetic whey; 5' sequence + inner sequence + 3'  sequence

SEQ ID NO: 47005 - DNA, 76 bp, Artificial Sequence; identical to SEQ ID NO: 3009
  Description of Artificial Sequence: Synthetic whey; 5' sequence + inner sequence + 3'  sequence

SEQ ID NO: 47006 - DNA, 76 bp, Artificial Sequence; identical to SEQ ID NO: 3008
  Description of Artificial Sequence: Synthetic whey; 5' sequence + inner sequence + 3'  sequence

SEQ ID NO: 47007 - DNA, 76 bp, Artificial Sequence; identical to SEQ ID NO: 3006
  Description of Artificial Sequence: Synthetic whey; 5' sequence + inner sequence + 3'  sequence

SEQ ID NO: 47008 - DNA, 76 bp, Artificial Sequence; identical to SEQ ID NO: 3020
  Description of Artificial Sequence: Synthetic whey; 5' sequence + inner sequence + 3'  sequence

SEQ ID NO: 47009 - DNA, 76 bp, Artificial Sequence; identical to SEQ ID NO: 3011
  Description of Artificial Sequence: Synthetic whey; 5' sequence + inner sequence + 3'  sequence

SEQ ID NO: 47010 - DNA, 76 bp, Artificial Sequence; identical to SEQ ID NO: 3003
  Description of Artificial Sequence: Synthetic whey; 5' sequence + inner sequence + 3'  sequence

SEQ ID NO: 47011 - DNA, 76 bp, Artificial Sequence; identical to SEQ ID NO: 3007
  Description of Artificial Sequence: Synthetic whey; 5' sequence + inner sequence + 3'  sequence

SEQ ID NO: 47012 - DNA, 76 bp, Artificial Sequence; identical to SEQ ID NO: 3052
  Description of Artificial Sequence: Synthetic whey; 5' sequence + inner sequence + 3'  sequence

SEQ ID NO: 47013 - DNA, 76 bp, Artificial Sequence; identical to SEQ ID NO: 3005
  Description of Artificial Sequence: Synthetic whey; 5' sequence + inner sequence + 3'  sequence

SEQ ID NO: 47014 - DNA, 76 bp, Artificial Sequence; identical to SEQ ID NO: 3028
  Description of Artificial Sequence: Synthetic whey; 5' sequence + inner sequence + 3'  sequence

SEQ ID NO: 47015 - DNA, 76 bp, Artificial Sequence; identical to SEQ ID NO: 3010
  Description of Artificial Sequence: Synthetic whey; 5' sequence + inner sequence + 3'  sequence

SEQ ID NO: 47016 - DNA, 76 bp, Artificial Sequence; identical to SEQ ID NO: 3014
  Description of Artificial Sequence: Synthetic whey; 5' sequence + inner sequence + 3'  sequence

SEQ ID NO: 47017 - DNA, 76 bp, Artificial Sequence; identical to SEQ ID NO: 3081
  Description of Artificial Sequence: Synthetic whey; 5' sequence + inner sequence + 3'  sequence

SEQ ID NO: 47018 - DNA, 76 bp, Artificial Sequence; identical to SEQ ID NO: 3201
  Description of Artificial Sequence: Synthetic whey; 5' sequence + inner sequence + 3'  sequence

SEQ ID NO: 47019 - DNA, 76 bp, Artificial Sequence; identical to SEQ ID NO: 3033
  Description of Artificial Sequence: Synthetic whey; 5' sequence + inner sequence + 3'  sequence

SEQ ID NO: 47020 - DNA, 76 bp, Artificial Sequence; identical to SEQ ID NO: 3040
  Description of Artificial Sequence: Synthetic whey; 5' sequence + inner sequence + 3'  sequence

SEQ ID NO: 47021 - DNA, 76 bp, Artificial Sequence; identical to SEQ ID NO: 3220
  Description of Artificial Sequence: Synthetic whey; 5' sequence + inner sequence + 3'  sequence

SEQ ID NO: 47022 - DNA, 74 bp, Artificial Sequence; identical to SEQ ID NO: 3241
  Description of Artificial Sequence: Synthetic whey; 5' sequence + inner sequence + 3'  sequence

SEQ ID NO: 47023 - DNA, 76 bp, Artificial Sequence; identical to SEQ ID NO: 3458
  Description of Artificial Sequence: Synthetic whey; 5' sequence + inner sequence + 3'  sequence

SEQ ID NO: 47024 - DNA, 76 bp, Artificial Sequence; identical to SEQ ID NO: 19640
  Description of Artificial Sequence: Synthetic whey; 5' sequence + inner sequence + 3'  sequence

SEQ ID NO: 47025 - DNA, 76 bp, Artificial Sequence; identical to SEQ ID NO: 3030
  Description of Artificial Sequence: Synthetic whey; 5' sequence + inner sequence + 3'  sequence

SEQ ID NO: 47026 - DNA, 76 bp, Artificial Sequence; identical to SEQ ID NO: 3046
  Description of Artificial Sequence: Synthetic whey; 5' sequence + inner sequence + 3'  sequence

SEQ ID NO: 47027 - DNA, 76 bp, Artificial Sequence; identical to SEQ ID NO: 3012
  Description of Artificial Sequence: Synthetic whey; 5' sequence + inner sequence + 3'  sequence

SEQ ID NO: 47028 - DNA, 76 bp, Artificial Sequence; identical to SEQ ID NO: 3036
  Description of Artificial Sequence: Synthetic whey; 5' sequence + inner sequence + 3'  sequence

SEQ ID NO: 47029 - DNA, 76 bp, Artificial Sequence; identical to SEQ ID NO: 3078
  Description of Artificial Sequence: Synthetic whey; 5' sequence + inner sequence + 3'  sequence

SEQ ID NO: 47030 - DNA, 76 bp, Artificial Sequence; identical to SEQ ID NO: 3279
  Description of Artificial Sequence: Synthetic whey; 5' sequence + inner sequence + 3'  sequence

SEQ ID NO: 47031 - DNA, 76 bp, Artificial Sequence; identical to SEQ ID NO: 3491
  Description of Artificial Sequence: Synthetic whey; 5' sequence + inner sequence + 3'  sequence

SEQ ID NO: 47032 - DNA, 76 bp, Artificial Sequence; identical to SEQ ID NO: 3108
  Description of Artificial Sequence: Synthetic whey; 5' sequence + inner sequence + 3'  sequence

SEQ ID NO: 47033 - DNA, 76 bp, Artificial Sequence; identical to SEQ ID NO: 23468
  Description of Artificial Sequence: Synthetic whey; 5' sequence + inner sequence + 3'  sequence

SEQ ID NO: 47034 - DNA, 76 bp, Artificial Sequence; identical to SEQ ID NO: 3115
  Description of Artificial Sequence: Synthetic whey; 5' sequence + inner sequence + 3'  sequence

SEQ ID NO: 47035 - DNA, 76 bp, Artificial Sequence; identical to SEQ ID NO: 23466
  Description of Artificial Sequence: Synthetic whey; 5' sequence + inner sequence + 3'  sequence

SEQ ID NO: 47036 - DNA, 76 bp, Artificial Sequence; identical to SEQ ID NO: 3063
  Description of Artificial Sequence: Synthetic whey; 5' sequence + inner sequence + 3'  sequence

SEQ ID NO: 47037 - DNA, 76 bp, Artificial Sequence; identical to SEQ ID NO: 3526
  Description of Artificial Sequence: Synthetic whey; 5' sequence + inner sequence + 3'  sequence

SEQ ID NO: 47038 - DNA, 76 bp, Artificial Sequence; identical to SEQ ID NO: 3015
  Description of Artificial Sequence: Synthetic whey; 5' sequence + inner sequence + 3'  sequence

SEQ ID NO: 47039 - DNA, 76 bp, Artificial Sequence; identical to SEQ ID NO: 19266
  Description of Artificial Sequence: Synthetic whey; 5' sequence + inner sequence + 3'  sequence

SEQ ID NO: 47040 - DNA, 76 bp, Artificial Sequence; identical to SEQ ID NO: 3023
  Description of Artificial Sequence: Synthetic whey; 5' sequence + inner sequence + 3'  sequence

SEQ ID NO: 47041 - DNA, 76 bp, Artificial Sequence; identical to SEQ ID NO: 3323
  Description of Artificial Sequence: Synthetic whey; 5' sequence + inner sequence + 3'  sequence

SEQ ID NO: 47042 - DNA, 76 bp, Artificial Sequence; identical to SEQ ID NO: 3071
  Description of Artificial Sequence: Synthetic whey; 5' sequence + inner sequence + 3'  sequence

SEQ ID NO: 47043 - DNA, 76 bp, Artificial Sequence; identical to SEQ ID NO: 3018
  Description of Artificial Sequence: Synthetic whey; 5' sequence + inner sequence + 3'  sequence

SEQ ID NO: 47044 - DNA, 76 bp, Artificial Sequence; identical to SEQ ID NO: 3506
  Description of Artificial Sequence: Synthetic whey; 5' sequence + inner sequence + 3'  sequence

SEQ ID NO: 47045 - DNA, 76 bp, Artificial Sequence; identical to SEQ ID NO: 3340
  Description of Artificial Sequence: Synthetic whey; 5' sequence + inner sequence + 3'  sequence

SEQ ID NO: 47046 - DNA, 76 bp, Artificial Sequence; identical to SEQ ID NO: 3145
  Description of Artificial Sequence: Synthetic whey; 5' sequence + inner sequence + 3'  sequence

SEQ ID NO: 47047 - DNA, 76 bp, Artificial Sequence; identical to SEQ ID NO: 31208
  Description of Artificial Sequence: Synthetic whey; 5' sequence + inner sequence + 3'  sequence

SEQ ID NO: 47048 - DNA, 76 bp, Artificial Sequence; identical to SEQ ID NO: 3066
  Description of Artificial Sequence: Synthetic whey; 5' sequence + inner sequence + 3'  sequence

SEQ ID NO: 47049 - DNA, 76 bp, Artificial Sequence; identical to SEQ ID NO: 3110
  Description of Artificial Sequence: Synthetic whey; 5' sequence + inner sequence + 3'  sequence

SEQ ID NO: 47050 - DNA, 76 bp, Artificial Sequence; identical to SEQ ID NO: 3131
  Description of Artificial Sequence: Synthetic whey; 5' sequence + inner sequence + 3'  sequence

SEQ ID NO: 47051 - DNA, 76 bp, Artificial Sequence; identical to SEQ ID NO: 3035
  Description of Artificial Sequence: Synthetic whey; 5' sequence + inner sequence + 3'  sequence

SEQ ID NO: 47052 - DNA, 76 bp, Artificial Sequence; identical to SEQ ID NO: 3045
  Description of Artificial Sequence: Synthetic whey; 5' sequence + inner sequence + 3'  sequence

SEQ ID NO: 47053 - DNA, 76 bp, Artificial Sequence; identical to SEQ ID NO: 19819
  Description of Artificial Sequence: Synthetic whey; 5' sequence + inner sequence + 3'  sequence

SEQ ID NO: 47054 - DNA, 76 bp, Artificial Sequence; identical to SEQ ID NO: 3369
  Description of Artificial Sequence: Synthetic whey; 5' sequence + inner sequence + 3'  sequence

SEQ ID NO: 47055 - DNA, 76 bp, Artificial Sequence; identical to SEQ ID NO: 3022
  Description of Artificial Sequence: Synthetic whey; 5' sequence + inner sequence + 3'  sequence

SEQ ID NO: 47056 - DNA, 76 bp, Artificial Sequence; identical to SEQ ID NO: 31199
  Description of Artificial Sequence: Synthetic whey; 5' sequence + inner sequence + 3'  sequence

SEQ ID NO: 47057 - DNA, 76 bp, Artificial Sequence; identical to SEQ ID NO: 3121
  Description of Artificial Sequence: Synthetic whey; 5' sequence + inner sequence + 3'  sequence

SEQ ID NO: 47058 - DNA, 76 bp, Artificial Sequence; identical to SEQ ID NO: 3454
  Description of Artificial Sequence: Synthetic whey; 5' sequence + inner sequence + 3'  sequence

SEQ ID NO: 47059 - DNA, 76 bp, Artificial Sequence; identical to SEQ ID NO: 19818
  Description of Artificial Sequence: Synthetic whey; 5' sequence + inner sequence + 3'  sequence

SEQ ID NO: 47060 - DNA, 76 bp, Artificial Sequence; identical to SEQ ID NO: 3381
  Description of Artificial Sequence: Synthetic whey; 5' sequence + inner sequence + 3'  sequence

SEQ ID NO: 47061 - DNA, 76 bp, Artificial Sequence; identical to SEQ ID NO: 3079
  Description of Artificial Sequence: Synthetic whey; 5' sequence + inner sequence + 3'  sequence

SEQ ID NO: 47062 - DNA, 76 bp, Artificial Sequence; identical to SEQ ID NO: 3037
  Description of Artificial Sequence: Synthetic whey; 5' sequence + inner sequence + 3'  sequence

SEQ ID NO: 47063 - DNA, 77 bp, Artificial Sequence; identical to SEQ ID NO: 19373
  Description of Artificial Sequence: Synthetic whey; 5' sequence + inner sequence + 3'  sequence

SEQ ID NO: 47064 - DNA, 76 bp, Artificial Sequence; identical to SEQ ID NO: 31252
  Description of Artificial Sequence: Synthetic whey; 5' sequence + inner sequence + 3'  sequence

SEQ ID NO: 47065 - DNA, 76 bp, Artificial Sequence; identical to SEQ ID NO: 3086
  Description of Artificial Sequence: Synthetic whey; 5' sequence + inner sequence + 3'  sequence

SEQ ID NO: 47066 - DNA, 76 bp, Artificial Sequence; identical to SEQ ID NO: 3051
  Description of Artificial Sequence: Synthetic whey; 5' sequence + inner sequence + 3'  sequence

SEQ ID NO: 47067 - DNA, 76 bp, Artificial Sequence; identical to SEQ ID NO: 3041
  Description of Artificial Sequence: Synthetic whey; 5' sequence + inner sequence + 3'  sequence

SEQ ID NO: 47068 - DNA, 76 bp, Artificial Sequence; identical to SEQ ID NO: 3016
  Description of Artificial Sequence: Synthetic whey; 5' sequence + inner sequence + 3'  sequence

SEQ ID NO: 47069 - DNA, 76 bp, Artificial Sequence; identical to SEQ ID NO: 23495
  Description of Artificial Sequence: Synthetic whey; 5' sequence + inner sequence + 3'  sequence

SEQ ID NO: 47070 - DNA, 76 bp, Artificial Sequence; identical to SEQ ID NO: 3077
  Description of Artificial Sequence: Synthetic whey; 5' sequence + inner sequence + 3'  sequence

SEQ ID NO: 47071 - DNA, 76 bp, Artificial Sequence; identical to SEQ ID NO: 3013
  Description of Artificial Sequence: Synthetic whey; 5' sequence + inner sequence + 3'  sequence

SEQ ID NO: 47072 - DNA, 76 bp, Artificial Sequence; identical to SEQ ID NO: 31243
  Description of Artificial Sequence: Synthetic whey; 5' sequence + inner sequence + 3'  sequence

SEQ ID NO: 47073 - DNA, 76 bp, Artificial Sequence; identical to SEQ ID NO: 7659
  Description of Artificial Sequence: Synthetic whey; 5' sequence + inner sequence + 3'  sequence

SEQ ID NO: 47074 - DNA, 76 bp, Artificial Sequence; identical to SEQ ID NO: 3017
  Description of Artificial Sequence: Synthetic whey; 5' sequence + inner sequence + 3'  sequence

SEQ ID NO: 47075 - DNA, 76 bp, Artificial Sequence; identical to SEQ ID NO: 3025
  Description of Artificial Sequence: Synthetic whey; 5' sequence + inner sequence + 3'  sequence

SEQ ID NO: 47076 - DNA, 76 bp, Artificial Sequence; identical to SEQ ID NO: 31743
  Description of Artificial Sequence: Synthetic whey; 5' sequence + inner sequence + 3'  sequence

SEQ ID NO: 47077 - DNA, 76 bp, Artificial Sequence; identical to SEQ ID NO: 3117
  Description of Artificial Sequence: Synthetic whey; 5' sequence + inner sequence + 3'  sequence

SEQ ID NO: 47078 - DNA, 76 bp, Artificial Sequence; identical to SEQ ID NO: 3138
  Description of Artificial Sequence: Synthetic whey; 5' sequence + inner sequence + 3'  sequence

SEQ ID NO: 47079 - DNA, 76 bp, Artificial Sequence; identical to SEQ ID NO: 3217
  Description of Artificial Sequence: Synthetic whey; 5' sequence + inner sequence + 3'  sequence

SEQ ID NO: 47080 - DNA, 76 bp, Artificial Sequence; identical to SEQ ID NO: 23504
  Description of Artificial Sequence: Synthetic whey; 5' sequence + inner sequence + 3'  sequence

SEQ ID NO: 47081 - DNA, 76 bp, Artificial Sequence; identical to SEQ ID NO: 31310
  Description of Artificial Sequence: Synthetic whey; 5' sequence + inner sequence + 3'  sequence

SEQ ID NO: 47082 - DNA, 76 bp, Artificial Sequence; identical to SEQ ID NO: 3243
  Description of Artificial Sequence: Synthetic whey; 5' sequence + inner sequence + 3'  sequence

SEQ ID NO: 47083 - DNA, 76 bp, Artificial Sequence; identical to SEQ ID NO: 3174
  Description of Artificial Sequence: Synthetic whey; 5' sequence + inner sequence + 3'  sequence

SEQ ID NO: 47084 - DNA, 76 bp, Artificial Sequence; identical to SEQ ID NO: 3697
  Description of Artificial Sequence: Synthetic whey; 5' sequence + inner sequence + 3'  sequence

SEQ ID NO: 47085 - DNA, 76 bp, Artificial Sequence; identical to SEQ ID NO: 3027
  Description of Artificial Sequence: Synthetic whey; 5' sequence + inner sequence + 3'  sequence

SEQ ID NO: 47086 - DNA, 76 bp, Artificial Sequence; identical to SEQ ID NO: 3344
  Description of Artificial Sequence: Synthetic whey; 5' sequence + inner sequence + 3'  sequence

SEQ ID NO: 47087 - DNA, 76 bp, Artificial Sequence; identical to SEQ ID NO: 3049
  Description of Artificial Sequence: Synthetic whey; 5' sequence + inner sequence + 3'  sequence

SEQ ID NO: 47088 - DNA, 76 bp, Artificial Sequence; identical to SEQ ID NO: 3194
  Description of Artificial Sequence: Synthetic whey; 5' sequence + inner sequence + 3'  sequence

SEQ ID NO: 47089 - DNA, 76 bp, Artificial Sequence; identical to SEQ ID NO: 3372
  Description of Artificial Sequence: Synthetic whey; 5' sequence + inner sequence + 3'  sequence

SEQ ID NO: 47090 - DNA, 76 bp, Artificial Sequence; identical to SEQ ID NO: 19603
  Description of Artificial Sequence: Synthetic whey; 5' sequence + inner sequence + 3'  sequence

SEQ ID NO: 47091 - DNA, 76 bp, Artificial Sequence; identical to SEQ ID NO: 31477
  Description of Artificial Sequence: Synthetic whey; 5' sequence + inner sequence + 3'  sequence

SEQ ID NO: 47092 - DNA, 76 bp, Artificial Sequence; identical to SEQ ID NO: 3184
  Description of Artificial Sequence: Synthetic whey; 5' sequence + inner sequence + 3'  sequence

SEQ ID NO: 47093 - DNA, 76 bp, Artificial Sequence; identical to SEQ ID NO: 3290
  Description of Artificial Sequence: Synthetic whey; 5' sequence + inner sequence + 3'  sequence

SEQ ID NO: 47094 - DNA, 76 bp, Artificial Sequence; identical to SEQ ID NO: 3249
  Description of Artificial Sequence: Synthetic whey; 5' sequence + inner sequence + 3'  sequence

SEQ ID NO: 47095 - DNA, 76 bp, Artificial Sequence; identical to SEQ ID NO: 23540
  Description of Artificial Sequence: Synthetic whey; 5' sequence + inner sequence + 3'  sequence

SEQ ID NO: 47096 - DNA, 76 bp, Artificial Sequence; identical to SEQ ID NO: 23105
  Description of Artificial Sequence: Synthetic whey; 5' sequence + inner sequence + 3'  sequence

SEQ ID NO: 47097 - DNA, 76 bp, Artificial Sequence; identical to SEQ ID NO: 3228
  Description of Artificial Sequence: Synthetic whey; 5' sequence + inner sequence + 3'  sequence

SEQ ID NO: 47098 - DNA, 76 bp, Artificial Sequence; identical to SEQ ID NO: 3019
  Description of Artificial Sequence: Synthetic whey; 5' sequence + inner sequence + 3'  sequence

SEQ ID NO: 47099 - DNA, 76 bp, Artificial Sequence; identical to SEQ ID NO: 3281
  Description of Artificial Sequence: Synthetic whey; 5' sequence + inner sequence + 3'  sequence

SEQ ID NO: 47100 - DNA, 76 bp, Artificial Sequence; identical to SEQ ID NO: 23486
  Description of Artificial Sequence: Synthetic whey; 5' sequence + inner sequence + 3'  sequence

SEQ ID NO: 47101 - DNA, 76 bp, Artificial Sequence; identical to SEQ ID NO: 3053
  Description of Artificial Sequence: Synthetic whey; 5' sequence + inner sequence + 3'  sequence

SEQ ID NO: 47102 - DNA, 76 bp, Artificial Sequence; identical to SEQ ID NO: 3442
  Description of Artificial Sequence: Synthetic whey; 5' sequence + inner sequence + 3'  sequence

SEQ ID NO: 47103 - DNA, 76 bp, Artificial Sequence; identical to SEQ ID NO: 3072
  Description of Artificial Sequence: Synthetic whey; 5' sequence + inner sequence + 3'  sequence

SEQ ID NO: 47104 - DNA, 76 bp, Artificial Sequence; identical to SEQ ID NO: 3283
  Description of Artificial Sequence: Synthetic whey; 5' sequence + inner sequence + 3'  sequence

SEQ ID NO: 47105 - DNA, 76 bp, Artificial Sequence; identical to SEQ ID NO: 3123
  Description of Artificial Sequence: Synthetic whey; 5' sequence + inner sequence + 3'  sequence

SEQ ID NO: 47106 - DNA, 76 bp, Artificial Sequence; identical to SEQ ID NO: 15997
  Description of Artificial Sequence: Synthetic whey; 5' sequence + inner sequence + 3'  sequence

SEQ ID NO: 47107 - DNA, 76 bp, Artificial Sequence; identical to SEQ ID NO: 3776
  Description of Artificial Sequence: Synthetic whey; 5' sequence + inner sequence + 3'  sequence

SEQ ID NO: 47108 - DNA, 77 bp, Artificial Sequence; identical to SEQ ID NO: 3971
  Description of Artificial Sequence: Synthetic whey; 5' sequence + inner sequence + 3'  sequence

SEQ ID NO: 47109 - DNA, 76 bp, Artificial Sequence; identical to SEQ ID NO: 31379
  Description of Artificial Sequence: Synthetic whey; 5' sequence + inner sequence + 3'  sequence

SEQ ID NO: 47110 - DNA, 76 bp, Artificial Sequence; identical to SEQ ID NO: 3232
  Description of Artificial Sequence: Synthetic whey; 5' sequence + inner sequence + 3'  sequence

SEQ ID NO: 47111 - DNA, 76 bp, Artificial Sequence
  Description of Artificial Sequence: Synthetic whey; 5' sequence + inner sequence + 3'  sequence
tagggaagagaaggacatatgatgtcactgtgcctgaccttcaagttgcggcattgactagtacatgaccacttga

SEQ ID NO: 47112 - DNA, 76 bp, Artificial Sequence
  Description of Artificial Sequence: Synthetic whey; 5' sequence + inner sequence + 3'  sequence
tagggaagagaaggacatatgatgcacgactcgcaccctatcatgttggcatgttgactagtacatgaccacttga

SEQ ID NO: 47113 - DNA, 76 bp, Artificial Sequence; identical to SEQ ID NO: 3073
  Description of Artificial Sequence: Synthetic whey; 5' sequence + inner sequence + 3'  sequence

SEQ ID NO: 47114 - DNA, 76 bp, Artificial Sequence; identical to SEQ ID NO: 23524
  Description of Artificial Sequence: Synthetic whey; 5' sequence + inner sequence + 3'  sequence

SEQ ID NO: 47115 - DNA, 76 bp, Artificial Sequence; identical to SEQ ID NO: 7336
  Description of Artificial Sequence: Synthetic whey; 5' sequence + inner sequence + 3'  sequence

SEQ ID NO: 47116 - DNA, 76 bp, Artificial Sequence
  Description of Artificial Sequence: Synthetic whey; 5' sequence + inner sequence + 3'  sequence
tagggaagagaaggacatatgatacgacaacgcgatgacgtacgtacgatgtgttgactagtacatgaccacttga

SEQ ID NO: 47117 - DNA, 76 bp, Artificial Sequence; identical to SEQ ID NO: 31735
  Description of Artificial Sequence: Synthetic whey; 5' sequence + inner sequence + 3'  sequence

SEQ ID NO: 47118 - DNA, 76 bp, Artificial Sequence; identical to SEQ ID NO: 19211
  Description of Artificial Sequence: Synthetic whey; 5' sequence + inner sequence + 3'  sequence

SEQ ID NO: 47119 - DNA, 76 bp, Artificial Sequence; identical to SEQ ID NO: 3613
  Description of Artificial Sequence: Synthetic whey; 5' sequence + inner sequence + 3'  sequence

SEQ ID NO: 47120 - DNA, 76 bp, Artificial Sequence; identical to SEQ ID NO: 3031
  Description of Artificial Sequence: Synthetic whey; 5' sequence + inner sequence + 3'  sequence

SEQ ID NO: 47121 - DNA, 76 bp, Artificial Sequence; identical to SEQ ID NO: 3343
  Description of Artificial Sequence: Synthetic whey; 5' sequence + inner sequence + 3'  sequence

SEQ ID NO: 47122 - DNA, 76 bp, Artificial Sequence; identical to SEQ ID NO: 3047
  Description of Artificial Sequence: Synthetic whey; 5' sequence + inner sequence + 3'  sequence

SEQ ID NO: 47123 - DNA, 76 bp, Artificial Sequence; identical to SEQ ID NO: 3684
  Description of Artificial Sequence: Synthetic whey; 5' sequence + inner sequence + 3'  sequence

SEQ ID NO: 47124 - DNA, 76 bp, Artificial Sequence; identical to SEQ ID NO: 3212
  Description of Artificial Sequence: Synthetic whey; 5' sequence + inner sequence + 3'  sequence

SEQ ID NO: 47125 - DNA, 76 bp, Artificial Sequence; identical to SEQ ID NO: 31436
  Description of Artificial Sequence: Synthetic whey; 5' sequence + inner sequence + 3'  sequence

SEQ ID NO: 47126 - DNA, 76 bp, Artificial Sequence; identical to SEQ ID NO: 11946
  Description of Artificial Sequence: Synthetic whey; 5' sequence + inner sequence + 3'  sequence

SEQ ID NO: 47127 - DNA, 76 bp, Artificial Sequence
  Description of Artificial Sequence: Synthetic whey; 5' sequence + inner sequence + 3'  sequence
tagggaagagaaggacatatgatacgtcacgatgcacaagggcgtgctgcacgttgactagtacatgaccacttga

SEQ ID NO: 47128 - DNA, 76 bp, Artificial Sequence; identical to SEQ ID NO: 3467
  Description of Artificial Sequence: Synthetic whey; 5' sequence + inner sequence + 3'  sequence

SEQ ID NO: 47129 - DNA, 76 bp, Artificial Sequence; identical to SEQ ID NO: 3067
  Description of Artificial Sequence: Synthetic whey; 5' sequence + inner sequence + 3'  sequence

SEQ ID NO: 47130 - DNA, 76 bp, Artificial Sequence; identical to SEQ ID NO: 31315
  Description of Artificial Sequence: Synthetic whey; 5' sequence + inner sequence + 3'  sequence

SEQ ID NO: 47131 - DNA, 76 bp, Artificial Sequence; identical to SEQ ID NO: 31985
  Description of Artificial Sequence: Synthetic whey; 5' sequence + inner sequence + 3'  sequence

SEQ ID NO: 47132 - DNA, 76 bp, Artificial Sequence; identical to SEQ ID NO: 3172
  Description of Artificial Sequence: Synthetic whey; 5' sequence + inner sequence + 3'  sequence

SEQ ID NO: 47133 - DNA, 76 bp, Artificial Sequence
  Description of Artificial Sequence: Synthetic whey; 5' sequence + inner sequence + 3'  sequence
tagggaagagaaggacatatgatgtacgcatcgtcccgtcatgtggttgtggattgactagtacatgaccacttga

SEQ ID NO: 47134 - DNA, 76 bp, Artificial Sequence; identical to SEQ ID NO: 3272
  Description of Artificial Sequence: Synthetic whey; 5' sequence + inner sequence + 3'  sequence

SEQ ID NO: 47135 - DNA, 76 bp, Artificial Sequence; identical to SEQ ID NO: 3359
  Description of Artificial Sequence: Synthetic whey; 5' sequence + inner sequence + 3'  sequence

SEQ ID NO: 47136 - DNA, 76 bp, Artificial Sequence; identical to SEQ ID NO: 3886
  Description of Artificial Sequence: Synthetic whey; 5' sequence + inner sequence + 3'  sequence

SEQ ID NO: 47137 - DNA, 76 bp, Artificial Sequence; identical to SEQ ID NO: 3229
  Description of Artificial Sequence: Synthetic whey; 5' sequence + inner sequence + 3'  sequence

SEQ ID NO: 47138 - DNA, 76 bp, Artificial Sequence; identical to SEQ ID NO: 3379
  Description of Artificial Sequence: Synthetic whey; 5' sequence + inner sequence + 3'  sequence

SEQ ID NO: 47139 - DNA, 76 bp, Artificial Sequence; identical to SEQ ID NO: 31471
  Description of Artificial Sequence: Synthetic whey; 5' sequence + inner sequence + 3'  sequence

SEQ ID NO: 47140 - DNA, 76 bp, Artificial Sequence
  Description of Artificial Sequence: Synthetic whey; 5' sequence + inner sequence + 3'  sequence
tagggaagagaaggacatatgatacgtcacacgtcgagttacgctacgacacgttgactagtacatgaccacttga

SEQ ID NO: 47141 - DNA, 76 bp, Artificial Sequence; identical to SEQ ID NO: 31244
  Description of Artificial Sequence: Synthetic whey; 5' sequence + inner sequence + 3'  sequence

SEQ ID NO: 47142 - DNA, 76 bp, Artificial Sequence; identical to SEQ ID NO: 15775
  Description of Artificial Sequence: Synthetic whey; 5' sequence + inner sequence + 3'  sequence

SEQ ID NO: 47143 - DNA, 76 bp, Artificial Sequence; identical to SEQ ID NO: 3061
  Description of Artificial Sequence: Synthetic whey; 5' sequence + inner sequence + 3'  sequence

SEQ ID NO: 47144 - DNA, 76 bp, Artificial Sequence; identical to SEQ ID NO: 3029
  Description of Artificial Sequence: Synthetic whey; 5' sequence + inner sequence + 3'  sequence

SEQ ID NO: 47145 - DNA, 76 bp, Artificial Sequence; identical to SEQ ID NO: 31108
  Description of Artificial Sequence: Synthetic whey; 5' sequence + inner sequence + 3'  sequence

SEQ ID NO: 47146 - DNA, 76 bp, Artificial Sequence; identical to SEQ ID NO: 3611
  Description of Artificial Sequence: Synthetic whey; 5' sequence + inner sequence + 3'  sequence

SEQ ID NO: 47147 - DNA, 76 bp, Artificial Sequence; identical to SEQ ID NO: 3457
  Description of Artificial Sequence: Synthetic whey; 5' sequence + inner sequence + 3'  sequence

SEQ ID NO: 47148 - DNA, 76 bp, Artificial Sequence; identical to SEQ ID NO: 3178
  Description of Artificial Sequence: Synthetic whey; 5' sequence + inner sequence + 3'  sequence

SEQ ID NO: 47149 - DNA, 76 bp, Artificial Sequence; identical to SEQ ID NO: 3746
  Description of Artificial Sequence: Synthetic whey; 5' sequence + inner sequence + 3'  sequence

SEQ ID NO: 47150 - DNA, 76 bp, Artificial Sequence; identical to SEQ ID NO: 3225
  Description of Artificial Sequence: Synthetic whey; 5' sequence + inner sequence + 3'  sequence

SEQ ID NO: 47151 - DNA, 76 bp, Artificial Sequence
  Description of Artificial Sequence: Synthetic whey; 5' sequence + inner sequence + 3'  sequence
tagggaagagaaggacatatgatgtacgcatcgtcccttcatgtggttccgtattgactagtacatgaccacttga

SEQ ID NO: 47152 - DNA, 76 bp, Artificial Sequence; identical to SEQ ID NO: 19859
  Description of Artificial Sequence: Synthetic whey; 5' sequence + inner sequence + 3'  sequence

SEQ ID NO: 47153 - DNA, 75 bp, Artificial Sequence; identical to SEQ ID NO: 3251
  Description of Artificial Sequence: Synthetic whey; 5' sequence + inner sequence + 3'  sequence

SEQ ID NO: 47154 - DNA, 77 bp, Artificial Sequence; identical to SEQ ID NO: 3221
  Description of Artificial Sequence: Synthetic whey; 5' sequence + inner sequence + 3'  sequence

SEQ ID NO: 47155 - DNA, 76 bp, Artificial Sequence; identical to SEQ ID NO: 31147
  Description of Artificial Sequence: Synthetic whey; 5' sequence + inner sequence + 3'  sequence

SEQ ID NO: 47156 - DNA, 76 bp, Artificial Sequence; identical to SEQ ID NO: 19978
  Description of Artificial Sequence: Synthetic whey; 5' sequence + inner sequence + 3'  sequence

SEQ ID NO: 47157 - DNA, 76 bp, Artificial Sequence; identical to SEQ ID NO: 11876
  Description of Artificial Sequence: Synthetic whey; 5' sequence + inner sequence + 3'  sequence

SEQ ID NO: 47158 - DNA, 76 bp, Artificial Sequence; identical to SEQ ID NO: 23617
  Description of Artificial Sequence: Synthetic whey; 5' sequence + inner sequence + 3'  sequence

SEQ ID NO: 47159 - DNA, 76 bp, Artificial Sequence
  Description of Artificial Sequence: Synthetic whey; 5' sequence + inner sequence + 3'  sequence
tagggaagagaaggacatatgatcgtgcacacgacgacatgcactacgttgccttgactagtacatgaccacttga

SEQ ID NO: 47160 - DNA, 76 bp, Artificial Sequence; identical to SEQ ID NO: 3038
  Description of Artificial Sequence: Synthetic whey; 5' sequence + inner sequence + 3'  sequence

SEQ ID NO: 47161 - DNA, 76 bp, Artificial Sequence; identical to SEQ ID NO: 3622
  Description of Artificial Sequence: Synthetic whey; 5' sequence + inner sequence + 3'  sequence

SEQ ID NO: 47162 - DNA, 76 bp, Artificial Sequence; identical to SEQ ID NO: 3144
  Description of Artificial Sequence: Synthetic whey; 5' sequence + inner sequence + 3'  sequence

SEQ ID NO: 47163 - DNA, 76 bp, Artificial Sequence; identical to SEQ ID NO: 3231
  Description of Artificial Sequence: Synthetic whey; 5' sequence + inner sequence + 3'  sequence

SEQ ID NO: 47164 - DNA, 75 bp, Artificial Sequence
  Description of Artificial Sequence: Synthetic whey; 5' sequence + inner sequence + 3'  sequence
tagggaagagaaggacatatgatcgtgtgtgacgtacatgacgtgcttcgtgttgactagtacatgaccacttga

SEQ ID NO: 47165 - DNA, 76 bp, Artificial Sequence; identical to SEQ ID NO: 23151
  Description of Artificial Sequence: Synthetic whey; 5' sequence + inner sequence + 3'  sequence

SEQ ID NO: 47166 - DNA, 76 bp, Artificial Sequence
  Description of Artificial Sequence: Synthetic whey; 5' sequence + inner sequence + 3'  sequence
tagggaagagaaggacatatgatgtcactgtgcctgaccgtcaagttgtggcattgactagtacatgaccacttga

SEQ ID NO: 47167 - DNA, 76 bp, Artificial Sequence; identical to SEQ ID NO: 3151
  Description of Artificial Sequence: Synthetic whey; 5' sequence + inner sequence + 3'  sequence

SEQ ID NO: 47168 - DNA, 76 bp, Artificial Sequence; identical to SEQ ID NO: 31497
  Description of Artificial Sequence: Synthetic whey; 5' sequence + inner sequence + 3'  sequence

SEQ ID NO: 47169 - DNA, 76 bp, Artificial Sequence; identical to SEQ ID NO: 3303
  Description of Artificial Sequence: Synthetic whey; 5' sequence + inner sequence + 3'  sequence

SEQ ID NO: 47170 - DNA, 76 bp, Artificial Sequence; identical to SEQ ID NO: 3098
  Description of Artificial Sequence: Synthetic whey; 5' sequence + inner sequence + 3'  sequence

SEQ ID NO: 47171 - DNA, 76 bp, Artificial Sequence; identical to SEQ ID NO: 3352
  Description of Artificial Sequence: Synthetic whey; 5' sequence + inner sequence + 3'  sequence

SEQ ID NO: 47172 - DNA, 76 bp, Artificial Sequence; identical to SEQ ID NO: 3050
  Description of Artificial Sequence: Synthetic whey; 5' sequence + inner sequence + 3'  sequence

SEQ ID NO: 47173 - DNA, 76 bp, Artificial Sequence; identical to SEQ ID NO: 23551
  Description of Artificial Sequence: Synthetic whey; 5' sequence + inner sequence + 3'  sequence

SEQ ID NO: 47174 - DNA, 76 bp, Artificial Sequence; identical to SEQ ID NO: 3026
  Description of Artificial Sequence: Synthetic whey; 5' sequence + inner sequence + 3'  sequence

SEQ ID NO: 47175 - DNA, 76 bp, Artificial Sequence; identical to SEQ ID NO: 31526
  Description of Artificial Sequence: Synthetic whey; 5' sequence + inner sequence + 3'  sequence

SEQ ID NO: 47176 - DNA, 76 bp, Artificial Sequence; identical to SEQ ID NO: 3353
  Description of Artificial Sequence: Synthetic whey; 5' sequence + inner sequence + 3'  sequence

SEQ ID NO: 47177 - DNA, 76 bp, Artificial Sequence; identical to SEQ ID NO: 23560
  Description of Artificial Sequence: Synthetic whey; 5' sequence + inner sequence + 3'  sequence

SEQ ID NO: 47178 - DNA, 76 bp, Artificial Sequence; identical to SEQ ID NO: 3181
  Description of Artificial Sequence: Synthetic whey; 5' sequence + inner sequence + 3'  sequence

SEQ ID NO: 47179 - DNA, 76 bp, Artificial Sequence; identical to SEQ ID NO: 3728
  Description of Artificial Sequence: Synthetic whey; 5' sequence + inner sequence + 3'  sequence

SEQ ID NO: 47180 - DNA, 76 bp, Artificial Sequence; identical to SEQ ID NO: 3024
  Description of Artificial Sequence: Synthetic whey; 5' sequence + inner sequence + 3'  sequence

SEQ ID NO: 47181 - DNA, 76 bp, Artificial Sequence; identical to SEQ ID NO: 3884
  Description of Artificial Sequence: Synthetic whey; 5' sequence + inner sequence + 3'  sequence

SEQ ID NO: 47182 - DNA, 76 bp, Artificial Sequence
  Description of Artificial Sequence: Synthetic whey; 5' sequence + inner sequence + 3'  sequence
tagggaagagaaggacatatgatacgtcacggcatgcgtcacactgatgcatgttgactagtacatgaccacttga

SEQ ID NO: 47183 - DNA, 76 bp, Artificial Sequence; identical to SEQ ID NO: 3617
  Description of Artificial Sequence: Synthetic whey; 5' sequence + inner sequence + 3'  sequence

SEQ ID NO: 47184 - DNA, 76 bp, Artificial Sequence; identical to SEQ ID NO: 35743
  Description of Artificial Sequence: Synthetic whey; 5' sequence + inner sequence + 3'  sequence

SEQ ID NO: 47185 - DNA, 76 bp, Artificial Sequence; identical to SEQ ID NO: 3419
  Description of Artificial Sequence: Synthetic whey; 5' sequence + inner sequence + 3'  sequence

SEQ ID NO: 47186 - DNA, 76 bp, Artificial Sequence; identical to SEQ ID NO: 3891
  Description of Artificial Sequence: Synthetic whey; 5' sequence + inner sequence + 3'  sequence

SEQ ID NO: 47187 - DNA, 76 bp, Artificial Sequence; identical to SEQ ID NO: 3365
  Description of Artificial Sequence: Synthetic whey; 5' sequence + inner sequence + 3'  sequence

SEQ ID NO: 47188 - DNA, 76 bp, Artificial Sequence; identical to SEQ ID NO: 3615
  Description of Artificial Sequence: Synthetic whey; 5' sequence + inner sequence + 3'  sequence

SEQ ID NO: 47189 - DNA, 76 bp, Artificial Sequence
  Description of Artificial Sequence: Synthetic whey; 5' sequence + inner sequence + 3'  sequence
tagggaagagaaggacatatgatgtacgactcgcaccctatcatgtaggcatgttgactagtacatgaccacttga

SEQ ID NO: 47190 - DNA, 76 bp, Artificial Sequence; identical to SEQ ID NO: 31541
  Description of Artificial Sequence: Synthetic whey; 5' sequence + inner sequence + 3'  sequence

SEQ ID NO: 47191 - DNA, 76 bp, Artificial Sequence
  Description of Artificial Sequence: Synthetic whey; 5' sequence + inner sequence + 3'  sequence
tagggaagagaaggacatatgatgtcactgcgcctgaccgtcaagttgcggcattgactagtacatgaccacttga

SEQ ID NO: 47192 - DNA, 76 bp, Artificial Sequence; identical to SEQ ID NO: 3414
  Description of Artificial Sequence: Synthetic whey; 5' sequence + inner sequence + 3'  sequence

SEQ ID NO: 47193 - DNA, 76 bp, Artificial Sequence; identical to SEQ ID NO: 31400
  Description of Artificial Sequence: Synthetic whey; 5' sequence + inner sequence + 3'  sequence

SEQ ID NO: 47194 - DNA, 76 bp, Artificial Sequence; identical to SEQ ID NO: 31793
  Description of Artificial Sequence: Synthetic whey; 5' sequence + inner sequence + 3'  sequence

SEQ ID NO: 47195 - DNA, 76 bp, Artificial Sequence; identical to SEQ ID NO: 3129
  Description of Artificial Sequence: Synthetic whey; 5' sequence + inner sequence + 3'  sequence

SEQ ID NO: 47196 - DNA, 76 bp, Artificial Sequence; identical to SEQ ID NO: 19861
  Description of Artificial Sequence: Synthetic whey; 5' sequence + inner sequence + 3'  sequence

SEQ ID NO: 47197 - DNA, 76 bp, Artificial Sequence; identical to SEQ ID NO: 3320
  Description of Artificial Sequence: Synthetic whey; 5' sequence + inner sequence + 3'  sequence

SEQ ID NO: 47198 - DNA, 76 bp, Artificial Sequence; identical to SEQ ID NO: 3560
  Description of Artificial Sequence: Synthetic whey; 5' sequence + inner sequence + 3'  sequence

SEQ ID NO: 47199 - DNA, 76 bp, Artificial Sequence; identical to SEQ ID NO: 31939
  Description of Artificial Sequence: Synthetic whey; 5' sequence + inner sequence + 3'  sequence

SEQ ID NO: 47200 - DNA, 76 bp, Artificial Sequence; identical to SEQ ID NO: 19513
  Description of Artificial Sequence: Synthetic whey; 5' sequence + inner sequence + 3'  sequence

SEQ ID NO: 47201 - DNA, 76 bp, Artificial Sequence; identical to SEQ ID NO: 3202
  Description of Artificial Sequence: Synthetic whey; 5' sequence + inner sequence + 3'  sequence

SEQ ID NO: 47202 - DNA, 76 bp, Artificial Sequence; identical to SEQ ID NO: 3060
  Description of Artificial Sequence: Synthetic whey; 5' sequence + inner sequence + 3'  sequence

SEQ ID NO: 47203 - DNA, 76 bp, Artificial Sequence; identical to SEQ ID NO: 23302
  Description of Artificial Sequence: Synthetic whey; 5' sequence + inner sequence + 3'  sequence

SEQ ID NO: 47204 - DNA, 76 bp, Artificial Sequence; identical to SEQ ID NO: 3517
  Description of Artificial Sequence: Synthetic whey; 5' sequence + inner sequence + 3'  sequence

SEQ ID NO: 47205 - DNA, 76 bp, Artificial Sequence; identical to SEQ ID NO: 23889
  Description of Artificial Sequence: Synthetic whey; 5' sequence + inner sequence + 3'  sequence

SEQ ID NO: 47206 - DNA, 76 bp, Artificial Sequence; identical to SEQ ID NO: 3065
  Description of Artificial Sequence: Synthetic whey; 5' sequence + inner sequence + 3'  sequence

SEQ ID NO: 47207 - DNA, 76 bp, Artificial Sequence; identical to SEQ ID NO: 23984
  Description of Artificial Sequence: Synthetic whey; 5' sequence + inner sequence + 3'  sequence

SEQ ID NO: 47208 - DNA, 76 bp, Artificial Sequence; identical to SEQ ID NO: 19399
  Description of Artificial Sequence: Synthetic whey; 5' sequence + inner sequence + 3'  sequence

SEQ ID NO: 47209 - DNA, 76 bp, Artificial Sequence; identical to SEQ ID NO: 3823
  Description of Artificial Sequence: Synthetic whey; 5' sequence + inner sequence + 3'  sequence

SEQ ID NO: 47210 - DNA, 76 bp, Artificial Sequence; identical to SEQ ID NO: 3877
  Description of Artificial Sequence: Synthetic whey; 5' sequence + inner sequence + 3'  sequence

SEQ ID NO: 47211 - DNA, 76 bp, Artificial Sequence; identical to SEQ ID NO: 23917
  Description of Artificial Sequence: Synthetic whey; 5' sequence + inner sequence + 3'  sequence

SEQ ID NO: 47212 - DNA, 76 bp, Artificial Sequence
  Description of Artificial Sequence: Synthetic whey; 5' sequence + inner sequence + 3'  sequence
tagggaagagaaggacatatgataacgtgacgcgatcggtacgtgacgttgcgttgactagtacatgaccacttga

SEQ ID NO: 47213 - DNA, 76 bp, Artificial Sequence; identical to SEQ ID NO: 3192
  Description of Artificial Sequence: Synthetic whey; 5' sequence + inner sequence + 3'  sequence

SEQ ID NO: 47214 - DNA, 76 bp, Artificial Sequence
  Description of Artificial Sequence: Synthetic whey; 5' sequence + inner sequence + 3'  sequence
tagggaagagaaggacatatgatcgacacagtgcgtatcgtacgtcgtgccgcttgactagtacatgaccacttga

SEQ ID NO: 47215 - DNA, 76 bp, Artificial Sequence; identical to SEQ ID NO: 31233
  Description of Artificial Sequence: Synthetic whey; 5' sequence + inner sequence + 3'  sequence

SEQ ID NO: 47216 - DNA, 76 bp, Artificial Sequence
  Description of Artificial Sequence: Synthetic whey; 5' sequence + inner sequence + 3'  sequence
tagggaagagaaggacatatgatgtcactgtgcctgcccgtcaagttgcggcattgactagtacatgaccacttga

SEQ ID NO: 47217 - DNA, 76 bp, Artificial Sequence; identical to SEQ ID NO: 3780
  Description of Artificial Sequence: Synthetic whey; 5' sequence + inner sequence + 3'  sequence

SEQ ID NO: 47218 - DNA, 76 bp, Artificial Sequence; identical to SEQ ID NO: 3204
  Description of Artificial Sequence: Synthetic whey; 5' sequence + inner sequence + 3'  sequence

SEQ ID NO: 47219 - DNA, 76 bp, Artificial Sequence
  Description of Artificial Sequence: Synthetic whey; 5' sequence + inner sequence + 3'  sequence
tagggaagagaaggacatatgatcatgcgtcatgtccgtacgttcccgtcatgttgactagtacatgaccacttga

SEQ ID NO: 47220 - DNA, 76 bp, Artificial Sequence; identical to SEQ ID NO: 7356
  Description of Artificial Sequence: Synthetic whey; 5' sequence + inner sequence + 3'  sequence

SEQ ID NO: 47221 - DNA, 76 bp, Artificial Sequence; identical to SEQ ID NO: 31381
  Description of Artificial Sequence: Synthetic whey; 5' sequence + inner sequence + 3'  sequence

SEQ ID NO: 47222 - DNA, 76 bp, Artificial Sequence; identical to SEQ ID NO: 7960
  Description of Artificial Sequence: Synthetic whey; 5' sequence + inner sequence + 3'  sequence

SEQ ID NO: 47223 - DNA, 76 bp, Artificial Sequence; identical to SEQ ID NO: 3090
  Description of Artificial Sequence: Synthetic whey; 5' sequence + inner sequence + 3'  sequence

SEQ ID NO: 47224 - DNA, 76 bp, Artificial Sequence; identical to SEQ ID NO: 3446
  Description of Artificial Sequence: Synthetic whey; 5' sequence + inner sequence + 3'  sequence

SEQ ID NO: 47225 - DNA, 76 bp, Artificial Sequence
  Description of Artificial Sequence: Synthetic whey; 5' sequence + inner sequence + 3'  sequence
tagggaagagaaggacatatgatacgatgcgtgacaccgtgctgcgtgtgaccttgactagtacatgaccacttga

SEQ ID NO: 47226 - DNA, 76 bp, Artificial Sequence; identical to SEQ ID NO: 3437
  Description of Artificial Sequence: Synthetic whey; 5' sequence + inner sequence + 3'  sequence

SEQ ID NO: 47227 - DNA, 76 bp, Artificial Sequence
  Description of Artificial Sequence: Synthetic whey; 5' sequence + inner sequence + 3'  sequence
tagggaagagaaggacatatgatgtacgcaacgtaccgtatcgtggccatgtgttgactagtacatgaccacttga

SEQ ID NO: 47228 - DNA, 76 bp, Artificial Sequence; identical to SEQ ID NO: 31701
  Description of Artificial Sequence: Synthetic whey; 5' sequence + inner sequence + 3'  sequence

SEQ ID NO: 47229 - DNA, 76 bp, Artificial Sequence; identical to SEQ ID NO: 31934
  Description of Artificial Sequence: Synthetic whey; 5' sequence + inner sequence + 3'  sequence

SEQ ID NO: 47230 - DNA, 76 bp, Artificial Sequence; identical to SEQ ID NO: 23789
  Description of Artificial Sequence: Synthetic whey; 5' sequence + inner sequence + 3'  sequence

SEQ ID NO: 47231 - DNA, 76 bp, Artificial Sequence; identical to SEQ ID NO: 3285
  Description of Artificial Sequence: Synthetic whey; 5' sequence + inner sequence + 3'  sequence

SEQ ID NO: 47232 - DNA, 76 bp, Artificial Sequence; identical to SEQ ID NO: 31699
  Description of Artificial Sequence: Synthetic whey; 5' sequence + inner sequence + 3'  sequence

SEQ ID NO: 47233 - DNA, 76 bp, Artificial Sequence; identical to SEQ ID NO: 31995
  Description of Artificial Sequence: Synthetic whey; 5' sequence + inner sequence + 3'  sequence

SEQ ID NO: 47234 - DNA, 75 bp, Artificial Sequence; identical to SEQ ID NO: 3193
  Description of Artificial Sequence: Synthetic whey; 5' sequence + inner sequence + 3'  sequence

SEQ ID NO: 47235 - DNA, 76 bp, Artificial Sequence; identical to SEQ ID NO: 23994
  Description of Artificial Sequence: Synthetic whey; 5' sequence + inner sequence + 3'  sequence

SEQ ID NO: 47236 - DNA, 76 bp, Artificial Sequence; identical to SEQ ID NO: 23426
  Description of Artificial Sequence: Synthetic whey; 5' sequence + inner sequence + 3'  sequence

SEQ ID NO: 47237 - DNA, 76 bp, Artificial Sequence
  Description of Artificial Sequence: Synthetic whey; 5' sequence + inner sequence + 3'  sequence
tagggaagagaaggacatatgatgtcactgtgcctgaccgtcaagttgcggtattgactagtacatgaccacttga

SEQ ID NO: 47238 - DNA, 76 bp, Artificial Sequence
  Description of Artificial Sequence: Synthetic whey; 5' sequence + inner sequence + 3'  sequence
tagggaagagaaggacatatgatgtcatgccatcccctcgagtgtgacaggtattgactagtacatgaccacttga

SEQ ID NO: 47239 - DNA, 76 bp, Artificial Sequence; identical to SEQ ID NO: 3358
  Description of Artificial Sequence: Synthetic whey; 5' sequence + inner sequence + 3'  sequence

SEQ ID NO: 47240 - DNA, 76 bp, Artificial Sequence; identical to SEQ ID NO: 31278
  Description of Artificial Sequence: Synthetic whey; 5' sequence + inner sequence + 3'  sequence

SEQ ID NO: 47241 - DNA, 76 bp, Artificial Sequence; identical to SEQ ID NO: 31924
  Description of Artificial Sequence: Synthetic whey; 5' sequence + inner sequence + 3'  sequence

SEQ ID NO: 47242 - DNA, 76 bp, Artificial Sequence; identical to SEQ ID NO: 3161
  Description of Artificial Sequence: Synthetic whey; 5' sequence + inner sequence + 3'  sequence

SEQ ID NO: 47243 - DNA, 76 bp, Artificial Sequence; identical to SEQ ID NO: 3727
  Description of Artificial Sequence: Synthetic whey; 5' sequence + inner sequence + 3'  sequence

SEQ ID NO: 47244 - DNA, 76 bp, Artificial Sequence; identical to SEQ ID NO: 11868
  Description of Artificial Sequence: Synthetic whey; 5' sequence + inner sequence + 3'  sequence

SEQ ID NO: 47245 - DNA, 76 bp, Artificial Sequence
  Description of Artificial Sequence: Synthetic whey; 5' sequence + inner sequence + 3'  sequence
tagggaagagaaggacatatgatgtcatgcacgaacactatcatgtaggcatgttgactagtacatgaccacttga

SEQ ID NO: 47246 - DNA, 76 bp, Artificial Sequence; identical to SEQ ID NO: 3429
  Description of Artificial Sequence: Synthetic whey; 5' sequence + inner sequence + 3'  sequence

SEQ ID NO: 47247 - DNA, 76 bp, Artificial Sequence; identical to SEQ ID NO: 3227
  Description of Artificial Sequence: Synthetic whey; 5' sequence + inner sequence + 3'  sequence

SEQ ID NO: 47248 - DNA, 76 bp, Artificial Sequence; identical to SEQ ID NO: 31782
  Description of Artificial Sequence: Synthetic whey; 5' sequence + inner sequence + 3'  sequence

SEQ ID NO: 47249 - DNA, 76 bp, Artificial Sequence
  Description of Artificial Sequence: Synthetic whey; 5' sequence + inner sequence + 3'  sequence
tagggaagagaaggacatatgatacgtcacgcaaggaacgttacgcatgcgcgttgactagtacatgaccacttga

SEQ ID NO: 47250 - DNA, 76 bp, Artificial Sequence; identical to SEQ ID NO: 3486
  Description of Artificial Sequence: Synthetic whey; 5' sequence + inner sequence + 3'  sequence

SEQ ID NO: 47251 - DNA, 76 bp, Artificial Sequence
  Description of Artificial Sequence: Synthetic whey; 5' sequence + inner sequence + 3'  sequence
tagggaagagaaggacatatgatgtccctgtgcctgaccgtcaagttgcggcattgactagtacatgaccacttga

SEQ ID NO: 47252 - DNA, 76 bp, Artificial Sequence; identical to SEQ ID NO: 11627
  Description of Artificial Sequence: Synthetic whey; 5' sequence + inner sequence + 3'  sequence

SEQ ID NO: 47253 - DNA, 76 bp, Artificial Sequence; identical to SEQ ID NO: 11810
  Description of Artificial Sequence: Synthetic whey; 5' sequence + inner sequence + 3'  sequence

SEQ ID NO: 47254 - DNA, 76 bp, Artificial Sequence; identical to SEQ ID NO: 31221
  Description of Artificial Sequence: Synthetic whey; 5' sequence + inner sequence + 3'  sequence

SEQ ID NO: 47255 - DNA, 76 bp, Artificial Sequence; identical to SEQ ID NO: 3244
  Description of Artificial Sequence: Synthetic whey; 5' sequence + inner sequence + 3'  sequence

SEQ ID NO: 47256 - DNA, 76 bp, Artificial Sequence
  Description of Artificial Sequence: Synthetic whey; 5' sequence + inner sequence + 3'  sequence
tagggaagagaaggacatatgatgtaactgtgcctgaccgtcaagttgcggcattgactagtacatgaccacttga

SEQ ID NO: 47257 - DNA, 76 bp, Artificial Sequence; identical to SEQ ID NO: 3219
  Description of Artificial Sequence: Synthetic whey; 5' sequence + inner sequence + 3'  sequence

SEQ ID NO: 47258 - DNA, 76 bp, Artificial Sequence; identical to SEQ ID NO: 23478
  Description of Artificial Sequence: Synthetic whey; 5' sequence + inner sequence + 3'  sequence

SEQ ID NO: 47259 - DNA, 76 bp, Artificial Sequence
  Description of Artificial Sequence: Synthetic whey; 5' sequence + inner sequence + 3'  sequence
tagggaagagaaggacatatgatcgtccgaatcgtaccgtgcatgtgcgttgtttgactagtacatgaccacttga

SEQ ID NO: 47260 - DNA, 76 bp, Artificial Sequence; identical to SEQ ID NO: 15853
  Description of Artificial Sequence: Synthetic whey; 5' sequence + inner sequence + 3'  sequence

SEQ ID NO: 47261 - DNA, 76 bp, Artificial Sequence; identical to SEQ ID NO: 23944
  Description of Artificial Sequence: Synthetic whey; 5' sequence + inner sequence + 3'  sequence

SEQ ID NO: 47262 - DNA, 76 bp, Artificial Sequence; identical to SEQ ID NO: 3383
  Description of Artificial Sequence: Synthetic whey; 5' sequence + inner sequence + 3'  sequence

SEQ ID NO: 47263 - DNA, 76 bp, Artificial Sequence; identical to SEQ ID NO: 3685
  Description of Artificial Sequence: Synthetic whey; 5' sequence + inner sequence + 3'  sequence

SEQ ID NO: 47264 - DNA, 76 bp, Artificial Sequence; identical to SEQ ID NO: 3632
  Description of Artificial Sequence: Synthetic whey; 5' sequence + inner sequence + 3'  sequence

SEQ ID NO: 47265 - DNA, 76 bp, Artificial Sequence; identical to SEQ ID NO: 11910
  Description of Artificial Sequence: Synthetic whey; 5' sequence + inner sequence + 3'  sequence

SEQ ID NO: 47266 - DNA, 76 bp, Artificial Sequence; identical to SEQ ID NO: 3059
  Description of Artificial Sequence: Synthetic whey; 5' sequence + inner sequence + 3'  sequence

SEQ ID NO: 47267 - DNA, 76 bp, Artificial Sequence; identical to SEQ ID NO: 31971
  Description of Artificial Sequence: Synthetic whey; 5' sequence + inner sequence + 3'  sequence

SEQ ID NO: 47268 - DNA, 76 bp, Artificial Sequence; identical to SEQ ID NO: 3492
  Description of Artificial Sequence: Synthetic whey; 5' sequence + inner sequence + 3'  sequence

SEQ ID NO: 47269 - DNA, 76 bp, Artificial Sequence; identical to SEQ ID NO: 19585
  Description of Artificial Sequence: Synthetic whey; 5' sequence + inner sequence + 3'  sequence

SEQ ID NO: 47270 - DNA, 76 bp, Artificial Sequence; identical to SEQ ID NO: 3195
  Description of Artificial Sequence: Synthetic whey; 5' sequence + inner sequence + 3'  sequence

SEQ ID NO: 47271 - DNA, 71 bp, Artificial Sequence; identical to SEQ ID NO: 19927
  Description of Artificial Sequence: Synthetic whey; 5' sequence + inner sequence + 3'  sequence

SEQ ID NO: 47272 - DNA, 76 bp, Artificial Sequence; identical to SEQ ID NO: 3190
  Description of Artificial Sequence: Synthetic whey; 5' sequence + inner sequence + 3'  sequence

SEQ ID NO: 47273 - DNA, 76 bp, Artificial Sequence; identical to SEQ ID NO: 3069
  Description of Artificial Sequence: Synthetic whey; 5' sequence + inner sequence + 3'  sequence

SEQ ID NO: 47274 - DNA, 76 bp, Artificial Sequence; identical to SEQ ID NO: 3141
  Description of Artificial Sequence: Synthetic whey; 5' sequence + inner sequence + 3'  sequence

SEQ ID NO: 47275 - DNA, 76 bp, Artificial Sequence; identical to SEQ ID NO: 3169
  Description of Artificial Sequence: Synthetic whey; 5' sequence + inner sequence + 3'  sequence

SEQ ID NO: 47276 - DNA, 76 bp, Artificial Sequence; identical to SEQ ID NO: 3177
  Description of Artificial Sequence: Synthetic whey; 5' sequence + inner sequence + 3'  sequence

SEQ ID NO: 47277 - DNA, 76 bp, Artificial Sequence; identical to SEQ ID NO: 3082
  Description of Artificial Sequence: Synthetic whey; 5' sequence + inner sequence + 3'  sequence

SEQ ID NO: 47278 - DNA, 76 bp, Artificial Sequence
  Description of Artificial Sequence: Synthetic whey; 5' sequence + inner sequence + 3'  sequence
tagggaagagaaggacatatgatgtcattccatcccttcgagtgtgacaggtattgactagtacatgaccacttga

SEQ ID NO: 47279 - DNA, 76 bp, Artificial Sequence; identical to SEQ ID NO: 11928
  Description of Artificial Sequence: Synthetic whey; 5' sequence + inner sequence + 3'  sequence

SEQ ID NO: 47280 - DNA, 75 bp, Artificial Sequence; identical to SEQ ID NO: 3873
  Description of Artificial Sequence: Synthetic whey; 5' sequence + inner sequence + 3'  sequence

SEQ ID NO: 47281 - DNA, 76 bp, Artificial Sequence; identical to SEQ ID NO: 19769
  Description of Artificial Sequence: Synthetic whey; 5' sequence + inner sequence + 3'  sequence

SEQ ID NO: 47282 - DNA, 76 bp, Artificial Sequence; identical to SEQ ID NO: 3149
  Description of Artificial Sequence: Synthetic whey; 5' sequence + inner sequence + 3'  sequence

SEQ ID NO: 47283 - DNA, 76 bp, Artificial Sequence
  Description of Artificial Sequence: Synthetic whey; 5' sequence + inner sequence + 3'  sequence
tagggaagagaaggacatatgatgtacgcctcgtcccgtcatgtggttccgtattgactagtacatgaccacttga

SEQ ID NO: 47284 - DNA, 76 bp, Artificial Sequence; identical to SEQ ID NO: 3205
  Description of Artificial Sequence: Synthetic whey; 5' sequence + inner sequence + 3'  sequence

SEQ ID NO: 47285 - DNA, 76 bp, Artificial Sequence; identical to SEQ ID NO: 3955
  Description of Artificial Sequence: Synthetic whey; 5' sequence + inner sequence + 3'  sequence

SEQ ID NO: 47286 - DNA, 76 bp, Artificial Sequence; identical to SEQ ID NO: 3644
  Description of Artificial Sequence: Synthetic whey; 5' sequence + inner sequence + 3'  sequence

SEQ ID NO: 47287 - DNA, 76 bp, Artificial Sequence
  Description of Artificial Sequence: Synthetic whey; 5' sequence + inner sequence + 3'  sequence
tagggaagagaaggacatatgatggacgcaacgcaccgtatcgtggccatgtattgactagtacatgaccacttga

SEQ ID NO: 47288 - DNA, 76 bp, Artificial Sequence; identical to SEQ ID NO: 3096
  Description of Artificial Sequence: Synthetic whey; 5' sequence + inner sequence + 3'  sequence

SEQ ID NO: 47289 - DNA, 76 bp, Artificial Sequence; identical to SEQ ID NO: 23473
  Description of Artificial Sequence: Synthetic whey; 5' sequence + inner sequence + 3'  sequence

SEQ ID NO: 47290 - DNA, 76 bp, Artificial Sequence; identical to SEQ ID NO: 3821
  Description of Artificial Sequence: Synthetic whey; 5' sequence + inner sequence + 3'  sequence

SEQ ID NO: 47291 - DNA, 76 bp, Artificial Sequence; identical to SEQ ID NO: 31839
  Description of Artificial Sequence: Synthetic whey; 5' sequence + inner sequence + 3'  sequence

SEQ ID NO: 47292 - DNA, 76 bp, Artificial Sequence; identical to SEQ ID NO: 3397
  Description of Artificial Sequence: Synthetic whey; 5' sequence + inner sequence + 3'  sequence

SEQ ID NO: 47293 - DNA, 76 bp, Artificial Sequence
  Description of Artificial Sequence: Synthetic whey; 5' sequence + inner sequence + 3'  sequence
tagggaagagaaggacatatgattgacgcaacgtaccgtatcgtggccatgtgttgactagtacatgaccacttga

SEQ ID NO: 47294 - DNA, 75 bp, Artificial Sequence; identical to SEQ ID NO: 3975
  Description of Artificial Sequence: Synthetic whey; 5' sequence + inner sequence + 3'  sequence

SEQ ID NO: 47295 - DNA, 76 bp, Artificial Sequence; identical to SEQ ID NO: 3048
  Description of Artificial Sequence: Synthetic whey; 5' sequence + inner sequence + 3'  sequence

SEQ ID NO: 47296 - DNA, 76 bp, Artificial Sequence; identical to SEQ ID NO: 3470
  Description of Artificial Sequence: Synthetic whey; 5' sequence + inner sequence + 3'  sequence

SEQ ID NO: 47297 - DNA, 76 bp, Artificial Sequence
  Description of Artificial Sequence: Synthetic whey; 5' sequence + inner sequence + 3'  sequence
tagggaagagaaggacatatgatgtcactgtgcctcaccgtcaagttgcggcattgactagtacatgaccacttga

SEQ ID NO: 47298 - DNA, 76 bp, Artificial Sequence; identical to SEQ ID NO: 3366
  Description of Artificial Sequence: Synthetic whey; 5' sequence + inner sequence + 3'  sequence

SEQ ID NO: 47299 - DNA, 76 bp, Artificial Sequence; identical to SEQ ID NO: 3901
  Description of Artificial Sequence: Synthetic whey; 5' sequence + inner sequence + 3'  sequence

SEQ ID NO: 47300 - DNA, 75 bp, Artificial Sequence; identical to SEQ ID NO: 31237
  Description of Artificial Sequence: Synthetic whey; 5' sequence + inner sequence + 3'  sequence

SEQ ID NO: 47301 - DNA, 76 bp, Artificial Sequence
  Description of Artificial Sequence: Synthetic whey; 5' sequence + inner sequence + 3'  sequence
tagggaagagaaggacatatgatagcgcaacatcgtaacgtgccatcgtcgtgttgactagtacatgaccacttga

SEQ ID NO: 47302 - DNA, 76 bp, Artificial Sequence; identical to SEQ ID NO: 23879
  Description of Artificial Sequence: Synthetic whey; 5' sequence + inner sequence + 3'  sequence

SEQ ID NO: 47303 - DNA, 76 bp, Artificial Sequence; identical to SEQ ID NO: 31993
  Description of Artificial Sequence: Synthetic whey; 5' sequence + inner sequence + 3'  sequence

SEQ ID NO: 47304 - DNA, 76 bp, Artificial Sequence; identical to SEQ ID NO: 31921
  Description of Artificial Sequence: Synthetic whey; 5' sequence + inner sequence + 3'  sequence

SEQ ID NO: 47305 - DNA, 76 bp, Artificial Sequence
  Description of Artificial Sequence: Synthetic whey; 5' sequence + inner sequence + 3'  sequence
tagggaagagaaggacatatgatggacgcaacgtaccttatcgtggccatgtattgactagtacatgaccacttga

SEQ ID NO: 47306 - DNA, 76 bp, Artificial Sequence; identical to SEQ ID NO: 7638
  Description of Artificial Sequence: Synthetic whey; 5' sequence + inner sequence + 3'  sequence

SEQ ID NO: 47307 - DNA, 76 bp, Artificial Sequence; identical to SEQ ID NO: 31808
  Description of Artificial Sequence: Synthetic whey; 5' sequence + inner sequence + 3'  sequence

SEQ ID NO: 47308 - DNA, 76 bp, Artificial Sequence; identical to SEQ ID NO: 43829
  Description of Artificial Sequence: Synthetic whey; 5' sequence + inner sequence + 3'  sequence

SEQ ID NO: 47309 - DNA, 76 bp, Artificial Sequence; identical to SEQ ID NO: 7938
  Description of Artificial Sequence: Synthetic whey; 5' sequence + inner sequence + 3'  sequence

SEQ ID NO: 47310 - DNA, 76 bp, Artificial Sequence; identical to SEQ ID NO: 7521
  Description of Artificial Sequence: Synthetic whey; 5' sequence + inner sequence + 3'  sequence

SEQ ID NO: 47311 - DNA, 76 bp, Artificial Sequence; identical to SEQ ID NO: 23708
  Description of Artificial Sequence: Synthetic whey; 5' sequence + inner sequence + 3'  sequence

SEQ ID NO: 47312 - DNA, 76 bp, Artificial Sequence
  Description of Artificial Sequence: Synthetic whey; 5' sequence + inner sequence + 3'  sequence
tagggaagagaaggacatatgatacgtgtcagcgtaacgtgcatgctgttgccttgactagtacatgaccacttga

SEQ ID NO: 47313 - DNA, 76 bp, Artificial Sequence; identical to SEQ ID NO: 23623
  Description of Artificial Sequence: Synthetic whey; 5' sequence + inner sequence + 3'  sequence

SEQ ID NO: 47314 - DNA, 76 bp, Artificial Sequence
  Description of Artificial Sequence: Synthetic whey; 5' sequence + inner sequence + 3'  sequence
tagggaagagaaggacatatgatgccactgtgcctgaccgtcaagttgcggcattgactagtacatgaccacttga

SEQ ID NO: 47315 - DNA, 76 bp, Artificial Sequence; identical to SEQ ID NO: 3185
  Description of Artificial Sequence: Synthetic whey; 5' sequence + inner sequence + 3'  sequence

SEQ ID NO: 47316 - DNA, 74 bp, Artificial Sequence; identical to SEQ ID NO: 3148
  Description of Artificial Sequence: Synthetic whey; 5' sequence + inner sequence + 3'  sequence

SEQ ID NO: 47317 - DNA, 76 bp, Artificial Sequence; identical to SEQ ID NO: 3619
  Description of Artificial Sequence: Synthetic whey; 5' sequence + inner sequence + 3'  sequence

SEQ ID NO: 47318 - DNA, 76 bp, Artificial Sequence
  Description of Artificial Sequence: Synthetic whey; 5' sequence + inner sequence + 3'  sequence
tagggaagagaaggacatatgatcgatgcgcatcgagcacacgtccgtacgcgttgactagtacatgaccacttga

SEQ ID NO: 47319 - DNA, 76 bp, Artificial Sequence; identical to SEQ ID NO: 3054
  Description of Artificial Sequence: Synthetic whey; 5' sequence + inner sequence + 3'  sequence

SEQ ID NO: 47320 - DNA, 76 bp, Artificial Sequence; identical to SEQ ID NO: 3386
  Description of Artificial Sequence: Synthetic whey; 5' sequence + inner sequence + 3'  sequence

SEQ ID NO: 47321 - DNA, 76 bp, Artificial Sequence
  Description of Artificial Sequence: Synthetic whey; 5' sequence + inner sequence + 3'  sequence
tagggaagagaaggacatatgatggacgcaacgtaacgttcgagtggtacgtattgactagtacatgaccacttga

SEQ ID NO: 47322 - DNA, 76 bp, Artificial Sequence; identical to SEQ ID NO: 23983
  Description of Artificial Sequence: Synthetic whey; 5' sequence + inner sequence + 3'  sequence

SEQ ID NO: 47323 - DNA, 76 bp, Artificial Sequence; identical to SEQ ID NO: 31382
  Description of Artificial Sequence: Synthetic whey; 5' sequence + inner sequence + 3'  sequence

SEQ ID NO: 47324 - DNA, 76 bp, Artificial Sequence; identical to SEQ ID NO: 3267
  Description of Artificial Sequence: Synthetic whey; 5' sequence + inner sequence + 3'  sequence

SEQ ID NO: 47325 - DNA, 76 bp, Artificial Sequence; identical to SEQ ID NO: 19837
  Description of Artificial Sequence: Synthetic whey; 5' sequence + inner sequence + 3'  sequence

SEQ ID NO: 47326 - DNA, 76 bp, Artificial Sequence; identical to SEQ ID NO: 7289
  Description of Artificial Sequence: Synthetic whey; 5' sequence + inner sequence + 3'  sequence

SEQ ID NO: 47327 - DNA, 76 bp, Artificial Sequence; identical to SEQ ID NO: 23836
  Description of Artificial Sequence: Synthetic whey; 5' sequence + inner sequence + 3'  sequence

SEQ ID NO: 47328 - DNA, 75 bp, Artificial Sequence; identical to SEQ ID NO: 3070
  Description of Artificial Sequence: Synthetic whey; 5' sequence + inner sequence + 3'  sequence

SEQ ID NO: 47329 - DNA, 76 bp, Artificial Sequence; identical to SEQ ID NO: 7272
  Description of Artificial Sequence: Synthetic whey; 5' sequence + inner sequence + 3'  sequence

SEQ ID NO: 47330 - DNA, 76 bp, Artificial Sequence; identical to SEQ ID NO: 3860
  Description of Artificial Sequence: Synthetic whey; 5' sequence + inner sequence + 3'  sequence

SEQ ID NO: 47331 - DNA, 76 bp, Artificial Sequence; identical to SEQ ID NO: 23769
  Description of Artificial Sequence: Synthetic whey; 5' sequence + inner sequence + 3'  sequence

SEQ ID NO: 47332 - DNA, 76 bp, Artificial Sequence; identical to SEQ ID NO: 7933
  Description of Artificial Sequence: Synthetic whey; 5' sequence + inner sequence + 3'  sequence

SEQ ID NO: 47333 - DNA, 76 bp, Artificial Sequence; identical to SEQ ID NO: 3142
  Description of Artificial Sequence: Synthetic whey; 5' sequence + inner sequence + 3'  sequence

SEQ ID NO: 47334 - DNA, 76 bp, Artificial Sequence; identical to SEQ ID NO: 31591
  Description of Artificial Sequence: Synthetic whey; 5' sequence + inner sequence + 3'  sequence

SEQ ID NO: 47335 - DNA, 76 bp, Artificial Sequence; identical to SEQ ID NO: 31693
  Description of Artificial Sequence: Synthetic whey; 5' sequence + inner sequence + 3'  sequence

SEQ ID NO: 47336 - DNA, 76 bp, Artificial Sequence; identical to SEQ ID NO: 3057
  Description of Artificial Sequence: Synthetic whey; 5' sequence + inner sequence + 3'  sequence

SEQ ID NO: 47337 - DNA, 76 bp, Artificial Sequence; identical to SEQ ID NO: 3742
  Description of Artificial Sequence: Synthetic whey; 5' sequence + inner sequence + 3'  sequence

SEQ ID NO: 47338 - DNA, 76 bp, Artificial Sequence; identical to SEQ ID NO: 11579
  Description of Artificial Sequence: Synthetic whey; 5' sequence + inner sequence + 3'  sequence

SEQ ID NO: 47339 - DNA, 74 bp, Artificial Sequence; identical to SEQ ID NO: 23328
  Description of Artificial Sequence: Synthetic whey; 5' sequence + inner sequence + 3'  sequence

SEQ ID NO: 47340 - DNA, 76 bp, Artificial Sequence; identical to SEQ ID NO: 19389
  Description of Artificial Sequence: Synthetic whey; 5' sequence + inner sequence + 3'  sequence

SEQ ID NO: 47341 - DNA, 76 bp, Artificial Sequence; identical to SEQ ID NO: 3274
  Description of Artificial Sequence: Synthetic whey; 5' sequence + inner sequence + 3'  sequence

SEQ ID NO: 47342 - DNA, 76 bp, Artificial Sequence; identical to SEQ ID NO: 31674
  Description of Artificial Sequence: Synthetic whey; 5' sequence + inner sequence + 3'  sequence

SEQ ID NO: 47343 - DNA, 76 bp, Artificial Sequence; identical to SEQ ID NO: 7543
  Description of Artificial Sequence: Synthetic whey; 5' sequence + inner sequence + 3'  sequence

SEQ ID NO: 47344 - DNA, 76 bp, Artificial Sequence
  Description of Artificial Sequence: Synthetic whey; 5' sequence + inner sequence + 3'  sequence
tagggaagagaaggacatatgatcatgccacgtgatgctgtcattccgtcacgttgactagtacatgaccacttga

SEQ ID NO: 47345 - DNA, 76 bp, Artificial Sequence
  Description of Artificial Sequence: Synthetic whey; 5' sequence + inner sequence + 3'  sequence
tagggaagagaaggacatatgatggacgccacgtaccgtatcgtggccatgtgttgactagtacatgaccacttga

SEQ ID NO: 47346 - DNA, 76 bp, Artificial Sequence; identical to SEQ ID NO: 7419
  Description of Artificial Sequence: Synthetic whey; 5' sequence + inner sequence + 3'  sequence

SEQ ID NO: 47347 - DNA, 76 bp, Artificial Sequence; identical to SEQ ID NO: 23496
  Description of Artificial Sequence: Synthetic whey; 5' sequence + inner sequence + 3'  sequence

SEQ ID NO: 47348 - DNA, 76 bp, Artificial Sequence
  Description of Artificial Sequence: Synthetic whey; 5' sequence + inner sequence + 3'  sequence
tagggaagagaaggacatatgatacgttgcgcagtacgtgtggacgtgatgcattgactagtacatgaccacttga

SEQ ID NO: 47349 - DNA, 76 bp, Artificial Sequence; identical to SEQ ID NO: 3647
  Description of Artificial Sequence: Synthetic whey; 5' sequence + inner sequence + 3'  sequence

SEQ ID NO: 47350 - DNA, 76 bp, Artificial Sequence; identical to SEQ ID NO: 3787
  Description of Artificial Sequence: Synthetic whey; 5' sequence + inner sequence + 3'  sequence

SEQ ID NO: 47351 - DNA, 76 bp, Artificial Sequence
  Description of Artificial Sequence: Synthetic whey; 5' sequence + inner sequence + 3'  sequence
tagggaagagaaggacatatgatccatctcgtcactatcatgtgtgtcacgtattgactagtacatgaccacttga

SEQ ID NO: 47352 - DNA, 76 bp, Artificial Sequence; identical to SEQ ID NO: 3289
  Description of Artificial Sequence: Synthetic whey; 5' sequence + inner sequence + 3'  sequence

SEQ ID NO: 47353 - DNA, 76 bp, Artificial Sequence; identical to SEQ ID NO: 31747
  Description of Artificial Sequence: Synthetic whey; 5' sequence + inner sequence + 3'  sequence

SEQ ID NO: 47354 - DNA, 76 bp, Artificial Sequence; identical to SEQ ID NO: 24001
  Description of Artificial Sequence: Synthetic whey; 5' sequence + inner sequence + 3'  sequence

SEQ ID NO: 47355 - DNA, 76 bp, Artificial Sequence; identical to SEQ ID NO: 23458
  Description of Artificial Sequence: Synthetic whey; 5' sequence + inner sequence + 3'  sequence

SEQ ID NO: 47356 - DNA, 76 bp, Artificial Sequence; identical to SEQ ID NO: 3294
  Description of Artificial Sequence: Synthetic whey; 5' sequence + inner sequence + 3'  sequence

SEQ ID NO: 47357 - DNA, 76 bp, Artificial Sequence; identical to SEQ ID NO: 11964
  Description of Artificial Sequence: Synthetic whey; 5' sequence + inner sequence + 3'  sequence

SEQ ID NO: 47358 - DNA, 76 bp, Artificial Sequence; identical to SEQ ID NO: 23730
  Description of Artificial Sequence: Synthetic whey; 5' sequence + inner sequence + 3'  sequence

SEQ ID NO: 47359 - DNA, 76 bp, Artificial Sequence; identical to SEQ ID NO: 7603
  Description of Artificial Sequence: Synthetic whey; 5' sequence + inner sequence + 3'  sequence

SEQ ID NO: 47360 - DNA, 76 bp, Artificial Sequence; identical to SEQ ID NO: 7429
  Description of Artificial Sequence: Synthetic whey; 5' sequence + inner sequence + 3'  sequence

SEQ ID NO: 47361 - DNA, 76 bp, Artificial Sequence; identical to SEQ ID NO: 3857
  Description of Artificial Sequence: Synthetic whey; 5' sequence + inner sequence + 3'  sequence

SEQ ID NO: 47362 - DNA, 76 bp, Artificial Sequence; identical to SEQ ID NO: 15892
  Description of Artificial Sequence: Synthetic whey; 5' sequence + inner sequence + 3'  sequence

SEQ ID NO: 47363 - DNA, 76 bp, Artificial Sequence; identical to SEQ ID NO: 3789
  Description of Artificial Sequence: Synthetic whey; 5' sequence + inner sequence + 3'  sequence

SEQ ID NO: 47364 - DNA, 76 bp, Artificial Sequence; identical to SEQ ID NO: 7627
  Description of Artificial Sequence: Synthetic whey; 5' sequence + inner sequence + 3'  sequence

SEQ ID NO: 47365 - DNA, 76 bp, Artificial Sequence; identical to SEQ ID NO: 3074
  Description of Artificial Sequence: Synthetic whey; 5' sequence + inner sequence + 3'  sequence

SEQ ID NO: 47366 - DNA, 76 bp, Artificial Sequence; identical to SEQ ID NO: 3186
  Description of Artificial Sequence: Synthetic whey; 5' sequence + inner sequence + 3'  sequence

SEQ ID NO: 47367 - DNA, 76 bp, Artificial Sequence
  Description of Artificial Sequence: Synthetic whey; 5' sequence + inner sequence + 3'  sequence
tagggaagagaaggacatatgatgtcactgtgcctgaccgtcaagtttcggcattgactagtacatgaccacttga

SEQ ID NO: 47368 - DNA, 76 bp, Artificial Sequence; identical to SEQ ID NO: 3183
  Description of Artificial Sequence: Synthetic whey; 5' sequence + inner sequence + 3'  sequence

SEQ ID NO: 47369 - DNA, 76 bp, Artificial Sequence; identical to SEQ ID NO: 35619
  Description of Artificial Sequence: Synthetic whey; 5' sequence + inner sequence + 3'  sequence

SEQ ID NO: 47370 - DNA, 76 bp, Artificial Sequence
  Description of Artificial Sequence: Synthetic whey; 5' sequence + inner sequence + 3'  sequence
tagggaagagaaggacatatgatgtcactgttcctgaccgtcaagttgcggcattgactagtacatgaccacttga

SEQ ID NO: 47371 - DNA, 76 bp, Artificial Sequence; identical to SEQ ID NO: 31957
  Description of Artificial Sequence: Synthetic whey; 5' sequence + inner sequence + 3'  sequence

SEQ ID NO: 47372 - DNA, 76 bp, Artificial Sequence
  Description of Artificial Sequence: Synthetic whey; 5' sequence + inner sequence + 3'  sequence
tagggaagagaaggacatatgatcatggcaacgtgatgcgtgtgacctgcacattgactagtacatgaccacttga

SEQ ID NO: 47373 - DNA, 76 bp, Artificial Sequence; identical to SEQ ID NO: 31869
  Description of Artificial Sequence: Synthetic whey; 5' sequence + inner sequence + 3'  sequence

SEQ ID NO: 47374 - DNA, 76 bp, Artificial Sequence; identical to SEQ ID NO: 7890
  Description of Artificial Sequence: Synthetic whey; 5' sequence + inner sequence + 3'  sequence

SEQ ID NO: 47375 - DNA, 76 bp, Artificial Sequence; identical to SEQ ID NO: 7743
  Description of Artificial Sequence: Synthetic whey; 5' sequence + inner sequence + 3'  sequence

SEQ ID NO: 47376 - DNA, 76 bp, Artificial Sequence; identical to SEQ ID NO: 3521
  Description of Artificial Sequence: Synthetic whey; 5' sequence + inner sequence + 3'  sequence

SEQ ID NO: 47377 - DNA, 76 bp, Artificial Sequence; identical to SEQ ID NO: 31720
  Description of Artificial Sequence: Synthetic whey; 5' sequence + inner sequence + 3'  sequence

SEQ ID NO: 47378 - DNA, 76 bp, Artificial Sequence; identical to SEQ ID NO: 23811
  Description of Artificial Sequence: Synthetic whey; 5' sequence + inner sequence + 3'  sequence

SEQ ID NO: 47379 - DNA, 76 bp, Artificial Sequence
  Description of Artificial Sequence: Synthetic whey; 5' sequence + inner sequence + 3'  sequence
tagggaagagaaggacatatgatcgatgcacacgatgatgcacgtccttcggcttgactagtacatgaccacttga

SEQ ID NO: 47380 - DNA, 76 bp, Artificial Sequence; identical to SEQ ID NO: 3203
  Description of Artificial Sequence: Synthetic whey; 5' sequence + inner sequence + 3'  sequence

SEQ ID NO: 47381 - DNA, 71 bp, Artificial Sequence; identical to SEQ ID NO: 23741
  Description of Artificial Sequence: Synthetic whey; 5' sequence + inner sequence + 3'  sequence

SEQ ID NO: 47382 - DNA, 76 bp, Artificial Sequence; identical to SEQ ID NO: 3805
  Description of Artificial Sequence: Synthetic whey; 5' sequence + inner sequence + 3'  sequence

SEQ ID NO: 47383 - DNA, 76 bp, Artificial Sequence; identical to SEQ ID NO: 3447
  Description of Artificial Sequence: Synthetic whey; 5' sequence + inner sequence + 3'  sequence

SEQ ID NO: 47384 - DNA, 76 bp, Artificial Sequence; identical to SEQ ID NO: 31416
  Description of Artificial Sequence: Synthetic whey; 5' sequence + inner sequence + 3'  sequence

SEQ ID NO: 47385 - DNA, 76 bp, Artificial Sequence
  Description of Artificial Sequence: Synthetic whey; 5' sequence + inner sequence + 3'  sequence
tagggaagagaaggacatatgatcacgacgtgacgtatcgctacatgcacacgttgactagtacatgaccacttga

SEQ ID NO: 47386 - DNA, 76 bp, Artificial Sequence; identical to SEQ ID NO: 7787
  Description of Artificial Sequence: Synthetic whey; 5' sequence + inner sequence + 3'  sequence

SEQ ID NO: 47387 - DNA, 76 bp, Artificial Sequence; identical to SEQ ID NO: 15958
  Description of Artificial Sequence: Synthetic whey; 5' sequence + inner sequence + 3'  sequence

SEQ ID NO: 47388 - DNA, 76 bp, Artificial Sequence
  Description of Artificial Sequence: Synthetic whey; 5' sequence + inner sequence + 3'  sequence
tagggaagagaaggacatatgatcgatgcagatcgatgtcgttacgctgcacgttgactagtacatgaccacttga

SEQ ID NO: 47389 - DNA, 76 bp, Artificial Sequence
  Description of Artificial Sequence: Synthetic whey; 5' sequence + inner sequence + 3'  sequence
tagggaagagaaggacatatgatgtcactgtgcctgaccgtcaagttgaggcattgactagtacatgaccacttga

SEQ ID NO: 47390 - DNA, 76 bp, Artificial Sequence; identical to SEQ ID NO: 3326
  Description of Artificial Sequence: Synthetic whey; 5' sequence + inner sequence + 3'  sequence

SEQ ID NO: 47391 - DNA, 76 bp, Artificial Sequence
  Description of Artificial Sequence: Synthetic whey; 5' sequence + inner sequence + 3'  sequence
tagggaagagaaggacatatgatggccgcaacgtaccgtatcgtggccatgtattgactagtacatgaccacttga

SEQ ID NO: 47392 - DNA, 76 bp, Artificial Sequence; identical to SEQ ID NO: 31316
  Description of Artificial Sequence: Synthetic whey; 5' sequence + inner sequence + 3'  sequence

SEQ ID NO: 47393 - DNA, 76 bp, Artificial Sequence; identical to SEQ ID NO: 7653
  Description of Artificial Sequence: Synthetic whey; 5' sequence + inner sequence + 3'  sequence

SEQ ID NO: 47394 - DNA, 76 bp, Artificial Sequence; identical to SEQ ID NO: 23696
  Description of Artificial Sequence: Synthetic whey; 5' sequence + inner sequence + 3'  sequence

SEQ ID NO: 47395 - DNA, 76 bp, Artificial Sequence; identical to SEQ ID NO: 3634
  Description of Artificial Sequence: Synthetic whey; 5' sequence + inner sequence + 3'  sequence

SEQ ID NO: 47396 - DNA, 76 bp, Artificial Sequence; identical to SEQ ID NO: 23722
  Description of Artificial Sequence: Synthetic whey; 5' sequence + inner sequence + 3'  sequence

SEQ ID NO: 47397 - DNA, 76 bp, Artificial Sequence; identical to SEQ ID NO: 3706
  Description of Artificial Sequence: Synthetic whey; 5' sequence + inner sequence + 3'  sequence

SEQ ID NO: 47398 - DNA, 76 bp, Artificial Sequence; identical to SEQ ID NO: 7955
  Description of Artificial Sequence: Synthetic whey; 5' sequence + inner sequence + 3'  sequence

SEQ ID NO: 47399 - DNA, 76 bp, Artificial Sequence
  Description of Artificial Sequence: Synthetic whey; 5' sequence + inner sequence + 3'  sequence
tagggaagagaaggacatatgatgtcatgccctcccttcgagtgtgacaggtattgactagtacatgaccacttga

SEQ ID NO: 47400 - DNA, 76 bp, Artificial Sequence; identical to SEQ ID NO: 31329
  Description of Artificial Sequence: Synthetic whey; 5' sequence + inner sequence + 3'  sequence

SEQ ID NO: 47401 - DNA, 76 bp, Artificial Sequence; identical to SEQ ID NO: 3351
  Description of Artificial Sequence: Synthetic whey; 5' sequence + inner sequence + 3'  sequence

SEQ ID NO: 47402 - DNA, 76 bp, Artificial Sequence
  Description of Artificial Sequence: Synthetic whey; 5' sequence + inner sequence + 3'  sequence
tagggaagagaaggacatatgatgtactcatcgtcccgtcatgtggttccgtattgactagtacatgaccacttga

SEQ ID NO: 47403 - DNA, 76 bp, Artificial Sequence; identical to SEQ ID NO: 11872
  Description of Artificial Sequence: Synthetic whey; 5' sequence + inner sequence + 3'  sequence

SEQ ID NO: 47404 - DNA, 76 bp, Artificial Sequence; identical to SEQ ID NO: 3132
  Description of Artificial Sequence: Synthetic whey; 5' sequence + inner sequence + 3'  sequence

SEQ ID NO: 47405 - DNA, 76 bp, Artificial Sequence; identical to SEQ ID NO: 23662
  Description of Artificial Sequence: Synthetic whey; 5' sequence + inner sequence + 3'  sequence

SEQ ID NO: 47406 - DNA, 76 bp, Artificial Sequence
  Description of Artificial Sequence: Synthetic whey; 5' sequence + inner sequence + 3'  sequence
tagggaagagaaggacatatgatgtaatgccatcccttcgagtgtgacaggtattgactagtacatgaccacttga

SEQ ID NO: 47407 - DNA, 76 bp, Artificial Sequence; identical to SEQ ID NO: 31884
  Description of Artificial Sequence: Synthetic whey; 5' sequence + inner sequence + 3'  sequence

SEQ ID NO: 47408 - DNA, 76 bp, Artificial Sequence; identical to SEQ ID NO: 7621
  Description of Artificial Sequence: Synthetic whey; 5' sequence + inner sequence + 3'  sequence

SEQ ID NO: 47409 - DNA, 76 bp, Artificial Sequence; identical to SEQ ID NO: 3056
  Description of Artificial Sequence: Synthetic whey; 5' sequence + inner sequence + 3'  sequence

SEQ ID NO: 47410 - DNA, 76 bp, Artificial Sequence; identical to SEQ ID NO: 7748
  Description of Artificial Sequence: Synthetic whey; 5' sequence + inner sequence + 3'  sequence

SEQ ID NO: 47411 - DNA, 76 bp, Artificial Sequence; identical to SEQ ID NO: 19906
  Description of Artificial Sequence: Synthetic whey; 5' sequence + inner sequence + 3'  sequence

SEQ ID NO: 47412 - DNA, 76 bp, Artificial Sequence
  Description of Artificial Sequence: Synthetic whey; 5' sequence + inner sequence + 3'  sequence
tagggaagagaaggacatatgatgtacgcaacgtaccgtatcgtggccatgtattgactagtacatgaccacttga

SEQ ID NO: 47413 - DNA, 76 bp, Artificial Sequence; identical to SEQ ID NO: 3256
  Description of Artificial Sequence: Synthetic whey; 5' sequence + inner sequence + 3'  sequence

SEQ ID NO: 47414 - DNA, 76 bp, Artificial Sequence; identical to SEQ ID NO: 3591
  Description of Artificial Sequence: Synthetic whey; 5' sequence + inner sequence + 3'  sequence

SEQ ID NO: 47415 - DNA, 76 bp, Artificial Sequence; identical to SEQ ID NO: 23613
  Description of Artificial Sequence: Synthetic whey; 5' sequence + inner sequence + 3'  sequence

SEQ ID NO: 47416 - DNA, 76 bp, Artificial Sequence; identical to SEQ ID NO: 23752
  Description of Artificial Sequence: Synthetic whey; 5' sequence + inner sequence + 3'  sequence

SEQ ID NO: 47417 - DNA, 76 bp, Artificial Sequence; identical to SEQ ID NO: 23530
  Description of Artificial Sequence: Synthetic whey; 5' sequence + inner sequence + 3'  sequence

SEQ ID NO: 47418 - DNA, 76 bp, Artificial Sequence; identical to SEQ ID NO: 19698
  Description of Artificial Sequence: Synthetic whey; 5' sequence + inner sequence + 3'  sequence

SEQ ID NO: 47419 - DNA, 76 bp, Artificial Sequence; identical to SEQ ID NO: 31909
  Description of Artificial Sequence: Synthetic whey; 5' sequence + inner sequence + 3'  sequence

SEQ ID NO: 47420 - DNA, 76 bp, Artificial Sequence; identical to SEQ ID NO: 7469
  Description of Artificial Sequence: Synthetic whey; 5' sequence + inner sequence + 3'  sequence

SEQ ID NO: 47421 - DNA, 76 bp, Artificial Sequence; identical to SEQ ID NO: 3114
  Description of Artificial Sequence: Synthetic whey; 5' sequence + inner sequence + 3'  sequence

SEQ ID NO: 47422 - DNA, 76 bp, Artificial Sequence
  Description of Artificial Sequence: Synthetic whey; 5' sequence + inner sequence + 3'  sequence
tagggaagagaaggacatatgatgtcactgtgcctgatcgtcaagttgcggcattgactagtacatgaccacttga

SEQ ID NO: 47423 - DNA, 76 bp, Artificial Sequence; identical to SEQ ID NO: 3160
  Description of Artificial Sequence: Synthetic whey; 5' sequence + inner sequence + 3'  sequence

SEQ ID NO: 47424 - DNA, 76 bp, Artificial Sequence; identical to SEQ ID NO: 7987
  Description of Artificial Sequence: Synthetic whey; 5' sequence + inner sequence + 3'  sequence

SEQ ID NO: 47425 - DNA, 76 bp, Artificial Sequence
  Description of Artificial Sequence: Synthetic whey; 5' sequence + inner sequence + 3'  sequence
tagggaagagaaggacatatgatacgtgcaacgtcacgtgctgcgtcgtcaccttgactagtacatgaccacttga

SEQ ID NO: 47426 - DNA, 76 bp, Artificial Sequence
  Description of Artificial Sequence: Synthetic whey; 5' sequence + inner sequence + 3'  sequence
tagggaagagaaggacatatgatcgtgacacgcgagccatgcgtacgtacgcgttgactagtacatgaccacttga

SEQ ID NO: 47427 - DNA, 76 bp, Artificial Sequence; identical to SEQ ID NO: 3255
  Description of Artificial Sequence: Synthetic whey; 5' sequence + inner sequence + 3'  sequence

SEQ ID NO: 47428 - DNA, 76 bp, Artificial Sequence; identical to SEQ ID NO: 7620
  Description of Artificial Sequence: Synthetic whey; 5' sequence + inner sequence + 3'  sequence

SEQ ID NO: 47429 - DNA, 76 bp, Artificial Sequence; identical to SEQ ID NO: 7579
  Description of Artificial Sequence: Synthetic whey; 5' sequence + inner sequence + 3'  sequence

SEQ ID NO: 47430 - DNA, 76 bp, Artificial Sequence
  Description of Artificial Sequence: Synthetic whey; 5' sequence + inner sequence + 3'  sequence
tagggaagagaaggacatatgatgtacgcatcgccccgtcatgtggttccgtattgactagtacatgaccacttga

SEQ ID NO: 47431 - DNA, 76 bp, Artificial Sequence; identical to SEQ ID NO: 35384
  Description of Artificial Sequence: Synthetic whey; 5' sequence + inner sequence + 3'  sequence

SEQ ID NO: 47432 - DNA, 76 bp, Artificial Sequence
  Description of Artificial Sequence: Synthetic whey; 5' sequence + inner sequence + 3'  sequence
tagggaagagaaggacatatgattggtcaacgcgcatacgtcacgattgcatgttgactagtacatgaccacttga

SEQ ID NO: 47433 - DNA, 76 bp, Artificial Sequence; identical to SEQ ID NO: 3246
  Description of Artificial Sequence: Synthetic whey; 5' sequence + inner sequence + 3'  sequence

SEQ ID NO: 47434 - DNA, 76 bp, Artificial Sequence; identical to SEQ ID NO: 11985
  Description of Artificial Sequence: Synthetic whey; 5' sequence + inner sequence + 3'  sequence

SEQ ID NO: 47435 - DNA, 75 bp, Artificial Sequence
  Description of Artificial Sequence: Synthetic whey; 5' sequence + inner sequence + 3'  sequence
tagggaagagaaggacatatgatgtcattccgcatcctacacgtggtgcatgttgactagtacatgaccacttga

SEQ ID NO: 47436 - DNA, 76 bp, Artificial Sequence; identical to SEQ ID NO: 7988
  Description of Artificial Sequence: Synthetic whey; 5' sequence + inner sequence + 3'  sequence

SEQ ID NO: 47437 - DNA, 76 bp, Artificial Sequence; identical to SEQ ID NO: 3519
  Description of Artificial Sequence: Synthetic whey; 5' sequence + inner sequence + 3'  sequence

SEQ ID NO: 47438 - DNA, 76 bp, Artificial Sequence; identical to SEQ ID NO: 7485
  Description of Artificial Sequence: Synthetic whey; 5' sequence + inner sequence + 3'  sequence

SEQ ID NO: 47439 - DNA, 76 bp, Artificial Sequence
  Description of Artificial Sequence: Synthetic whey; 5' sequence + inner sequence + 3'  sequence
tagggaagagaaggacatatgatggacgcaacgtaccgtatcgtggccctgtgttgactagtacatgaccacttga

SEQ ID NO: 47440 - DNA, 76 bp, Artificial Sequence; identical to SEQ ID NO: 31978
  Description of Artificial Sequence: Synthetic whey; 5' sequence + inner sequence + 3'  sequence

SEQ ID NO: 47441 - DNA, 76 bp, Artificial Sequence; identical to SEQ ID NO: 31432
  Description of Artificial Sequence: Synthetic whey; 5' sequence + inner sequence + 3'  sequence

SEQ ID NO: 47442 - DNA, 76 bp, Artificial Sequence; identical to SEQ ID NO: 3104
  Description of Artificial Sequence: Synthetic whey; 5' sequence + inner sequence + 3'  sequence

SEQ ID NO: 47443 - DNA, 76 bp, Artificial Sequence; identical to SEQ ID NO: 19744
  Description of Artificial Sequence: Synthetic whey; 5' sequence + inner sequence + 3'  sequence

SEQ ID NO: 47444 - DNA, 76 bp, Artificial Sequence
  Description of Artificial Sequence: Synthetic whey; 5' sequence + inner sequence + 3'  sequence
tagggaagagaaggacatatgatgtcactgtgcctgaccgtcatgttgcggcattgactagtacatgaccacttga

SEQ ID NO: 47445 - DNA, 76 bp, Artificial Sequence; identical to SEQ ID NO: 15743
  Description of Artificial Sequence: Synthetic whey; 5' sequence + inner sequence + 3'  sequence

SEQ ID NO: 47446 - DNA, 76 bp, Artificial Sequence
  Description of Artificial Sequence: Synthetic whey; 5' sequence + inner sequence + 3'  sequence
tagggaagagaaggacatatgatcgtaccagtacgcaacacgtcatcgtcacgttgactagtacatgaccacttga

SEQ ID NO: 47447 - DNA, 76 bp, Artificial Sequence; identical to SEQ ID NO: 39514
  Description of Artificial Sequence: Synthetic whey; 5' sequence + inner sequence + 3'  sequence

SEQ ID NO: 47448 - DNA, 76 bp, Artificial Sequence; identical to SEQ ID NO: 31960
  Description of Artificial Sequence: Synthetic whey; 5' sequence + inner sequence + 3'  sequence

SEQ ID NO: 47449 - DNA, 76 bp, Artificial Sequence; identical to SEQ ID NO: 19664
  Description of Artificial Sequence: Synthetic whey; 5' sequence + inner sequence + 3'  sequence

SEQ ID NO: 47450 - DNA, 76 bp, Artificial Sequence; identical to SEQ ID NO: 31751
  Description of Artificial Sequence: Synthetic whey; 5' sequence + inner sequence + 3'  sequence

SEQ ID NO: 47451 - DNA, 76 bp, Artificial Sequence; identical to SEQ ID NO: 3367
  Description of Artificial Sequence: Synthetic whey; 5' sequence + inner sequence + 3'  sequence

SEQ ID NO: 47452 - DNA, 78 bp, Artificial Sequence
  Description of Artificial Sequence: Synthetic whey; 5' sequence + inner sequence + 3'  sequence
tagggaagagaaggacatatgatggacgcaacgtaccgtatcgtggccatgcacattgactagtacatgaccacttga

SEQ ID NO: 47453 - DNA, 76 bp, Artificial Sequence; identical to SEQ ID NO: 23324
  Description of Artificial Sequence: Synthetic whey; 5' sequence + inner sequence + 3'  sequence

SEQ ID NO: 47454 - DNA, 76 bp, Artificial Sequence
  Description of Artificial Sequence: Synthetic whey; 5' sequence + inner sequence + 3'  sequence
tagggaagagaaggacatatgatgtcactgtgcctgaccgtcaagttgctgcattgactagtacatgaccacttga

SEQ ID NO: 47455 - DNA, 76 bp, Artificial Sequence; identical to SEQ ID NO: 23335
  Description of Artificial Sequence: Synthetic whey; 5' sequence + inner sequence + 3'  sequence

SEQ ID NO: 47456 - DNA, 76 bp, Artificial Sequence; identical to SEQ ID NO: 7612
  Description of Artificial Sequence: Synthetic whey; 5' sequence + inner sequence + 3'  sequence

SEQ ID NO: 47457 - DNA, 76 bp, Artificial Sequence; identical to SEQ ID NO: 3724
  Description of Artificial Sequence: Synthetic whey; 5' sequence + inner sequence + 3'  sequence

SEQ ID NO: 47458 - DNA, 76 bp, Artificial Sequence; identical to SEQ ID NO: 3920
  Description of Artificial Sequence: Synthetic whey; 5' sequence + inner sequence + 3'  sequence

SEQ ID NO: 47459 - DNA, 76 bp, Artificial Sequence; identical to SEQ ID NO: 3215
  Description of Artificial Sequence: Synthetic whey; 5' sequence + inner sequence + 3'  sequence

SEQ ID NO: 47460 - DNA, 76 bp, Artificial Sequence; identical to SEQ ID NO: 31814
  Description of Artificial Sequence: Synthetic whey; 5' sequence + inner sequence + 3'  sequence

SEQ ID NO: 47461 - DNA, 76 bp, Artificial Sequence
  Description of Artificial Sequence: Synthetic whey; 5' sequence + inner sequence + 3'  sequence
tagggaagagaaggacatatgatcgtaccacacgttacggcatgtgcttcgcattgactagtacatgaccacttga

SEQ ID NO: 47462 - DNA, 76 bp, Artificial Sequence
  Description of Artificial Sequence: Synthetic whey; 5' sequence + inner sequence + 3'  sequence
tagggaagagaaggacatatgatgtcatgccataccttcgagtgtgacaggtattgactagtacatgaccacttga

SEQ ID NO: 47463 - DNA, 76 bp, Artificial Sequence; identical to SEQ ID NO: 3152
  Description of Artificial Sequence: Synthetic whey; 5' sequence + inner sequence + 3'  sequence

SEQ ID NO: 47464 - DNA, 76 bp, Artificial Sequence; identical to SEQ ID NO: 19985
  Description of Artificial Sequence: Synthetic whey; 5' sequence + inner sequence + 3'  sequence

SEQ ID NO: 47465 - DNA, 76 bp, Artificial Sequence
  Description of Artificial Sequence: Synthetic whey; 5' sequence + inner sequence + 3'  sequence
tagggaagagaaggacatatgatcgtaccgcacgtgacgtgtccgtgccgtgattgactagtacatgaccacttga

SEQ ID NO: 47466 - DNA, 76 bp, Artificial Sequence
  Description of Artificial Sequence: Synthetic whey; 5' sequence + inner sequence + 3'  sequence
tagggaagagaaggacatatgatttcatgccatcccttcgagtgtgacaggtattgactagtacatgaccacttga

SEQ ID NO: 47467 - DNA, 76 bp, Artificial Sequence; identical to SEQ ID NO: 23683
  Description of Artificial Sequence: Synthetic whey; 5' sequence + inner sequence + 3'  sequence

SEQ ID NO: 47468 - DNA, 76 bp, Artificial Sequence; identical to SEQ ID NO: 7571
  Description of Artificial Sequence: Synthetic whey; 5' sequence + inner sequence + 3'  sequence

SEQ ID NO: 47469 - DNA, 76 bp, Artificial Sequence; identical to SEQ ID NO: 3143
  Description of Artificial Sequence: Synthetic whey; 5' sequence + inner sequence + 3'  sequence

SEQ ID NO: 47470 - DNA, 76 bp, Artificial Sequence
  Description of Artificial Sequence: Synthetic whey; 5' sequence + inner sequence + 3'  sequence
tagggaagagaaggacatatgatgcactgaacgcaccctatcatgtaggcatgttgactagtacatgaccacttga

SEQ ID NO: 47471 - DNA, 76 bp, Artificial Sequence; identical to SEQ ID NO: 3034
  Description of Artificial Sequence: Synthetic whey; 5' sequence + inner sequence + 3'  sequence

SEQ ID NO: 47472 - DNA, 76 bp, Artificial Sequence
  Description of Artificial Sequence: Synthetic whey; 5' sequence + inner sequence + 3'  sequence
tagggaagagaaggacatatgatggacgcaacgtaccgtatcgtggccatgttttgactagtacatgaccacttga

SEQ ID NO: 47473 - DNA, 76 bp, Artificial Sequence
  Description of Artificial Sequence: Synthetic whey; 5' sequence + inner sequence + 3'  sequence
tagggaagagaaggacatatgatgtcatgacatcccttcgagtgtgacaggtattgactagtacatgaccacttga

SEQ ID NO: 47474 - DNA, 76 bp, Artificial Sequence; identical to SEQ ID NO: 23737
  Description of Artificial Sequence: Synthetic whey; 5' sequence + inner sequence + 3'  sequence

SEQ ID NO: 47475 - DNA, 76 bp, Artificial Sequence; identical to SEQ ID NO: 27852
  Description of Artificial Sequence: Synthetic whey; 5' sequence + inner sequence + 3'  sequence

SEQ ID NO: 47476 - DNA, 76 bp, Artificial Sequence; identical to SEQ ID NO: 15985
  Description of Artificial Sequence: Synthetic whey; 5' sequence + inner sequence + 3'  sequence

SEQ ID NO: 47477 - DNA, 76 bp, Artificial Sequence; identical to SEQ ID NO: 3630
  Description of Artificial Sequence: Synthetic whey; 5' sequence + inner sequence + 3'  sequence

SEQ ID NO: 47478 - DNA, 76 bp, Artificial Sequence; identical to SEQ ID NO: 11798
  Description of Artificial Sequence: Synthetic whey; 5' sequence + inner sequence + 3'  sequence

SEQ ID NO: 47479 - DNA, 76 bp, Artificial Sequence
  Description of Artificial Sequence: Synthetic whey; 5' sequence + inner sequence + 3'  sequence
tagggaagagaaggacatatgatcgtacgacacggatacgtcctgtctgcacgttgactagtacatgaccacttga

SEQ ID NO: 47480 - DNA, 76 bp, Artificial Sequence; identical to SEQ ID NO: 3321
  Description of Artificial Sequence: Synthetic whey; 5' sequence + inner sequence + 3'  sequence

SEQ ID NO: 47481 - DNA, 76 bp, Artificial Sequence; identical to SEQ ID NO: 23801
  Description of Artificial Sequence: Synthetic whey; 5' sequence + inner sequence + 3'  sequence

SEQ ID NO: 47482 - DNA, 76 bp, Artificial Sequence; identical to SEQ ID NO: 3137
  Description of Artificial Sequence: Synthetic whey; 5' sequence + inner sequence + 3'  sequence

SEQ ID NO: 47483 - DNA, 76 bp, Artificial Sequence; identical to SEQ ID NO: 3553
  Description of Artificial Sequence: Synthetic whey; 5' sequence + inner sequence + 3'  sequence

SEQ ID NO: 47484 - DNA, 76 bp, Artificial Sequence
  Description of Artificial Sequence: Synthetic whey; 5' sequence + inner sequence + 3'  sequence
tagggaagagaaggacatatgatgtacgcatcgtcccgtcatgtggatccgtattgactagtacatgaccacttga

SEQ ID NO: 47485 - DNA, 76 bp, Artificial Sequence; identical to SEQ ID NO: 23776
  Description of Artificial Sequence: Synthetic whey; 5' sequence + inner sequence + 3'  sequence

SEQ ID NO: 47486 - DNA, 76 bp, Artificial Sequence; identical to SEQ ID NO: 23903
  Description of Artificial Sequence: Synthetic whey; 5' sequence + inner sequence + 3'  sequence

SEQ ID NO: 47487 - DNA, 76 bp, Artificial Sequence
  Description of Artificial Sequence: Synthetic whey; 5' sequence + inner sequence + 3'  sequence
tagggaagagaaggacatatgatttcattccgcatcctacacgtgggcacgtattgactagtacatgaccacttga

SEQ ID NO: 47488 - DNA, 76 bp, Artificial Sequence; identical to SEQ ID NO: 3088
  Description of Artificial Sequence: Synthetic whey; 5' sequence + inner sequence + 3'  sequence

SEQ ID NO: 47489 - DNA, 76 bp, Artificial Sequence; identical to SEQ ID NO: 23982
  Description of Artificial Sequence: Synthetic whey; 5' sequence + inner sequence + 3'  sequence

SEQ ID NO: 47490 - DNA, 76 bp, Artificial Sequence
  Description of Artificial Sequence: Synthetic whey; 5' sequence + inner sequence + 3'  sequence
tagggaagagaaggacatatgatggactcaacgtaccgtatcgtggccatgtgttgactagtacatgaccacttga

SEQ ID NO: 47491 - DNA, 76 bp, Artificial Sequence; identical to SEQ ID NO: 23746
  Description of Artificial Sequence: Synthetic whey; 5' sequence + inner sequence + 3'  sequence

SEQ ID NO: 47492 - DNA, 76 bp, Artificial Sequence; identical to SEQ ID NO: 3282
  Description of Artificial Sequence: Synthetic whey; 5' sequence + inner sequence + 3'  sequence

SEQ ID NO: 47493 - DNA, 76 bp, Artificial Sequence
  Description of Artificial Sequence: Synthetic whey; 5' sequence + inner sequence + 3'  sequence
tagggaagagaaggacatatgatcgtgcagcacgtacattgcgtcacgttggcttgactagtacatgaccacttga

SEQ ID NO: 47494 - DNA, 76 bp, Artificial Sequence; identical to SEQ ID NO: 19948
  Description of Artificial Sequence: Synthetic whey; 5' sequence + inner sequence + 3'  sequence

SEQ ID NO: 47495 - DNA, 76 bp, Artificial Sequence; identical to SEQ ID NO: 23519
  Description of Artificial Sequence: Synthetic whey; 5' sequence + inner sequence + 3'  sequence

SEQ ID NO: 47496 - DNA, 76 bp, Artificial Sequence; identical to SEQ ID NO: 3493
  Description of Artificial Sequence: Synthetic whey; 5' sequence + inner sequence + 3'  sequence

SEQ ID NO: 47497 - DNA, 76 bp, Artificial Sequence
  Description of Artificial Sequence: Synthetic whey; 5' sequence + inner sequence + 3'  sequence
tagggaagagaaggacatatgatgtacgcatcgtcccgtcatgtggttcagtattgactagtacatgaccacttga

SEQ ID NO: 47498 - DNA, 76 bp, Artificial Sequence; identical to SEQ ID NO: 23869
  Description of Artificial Sequence: Synthetic whey; 5' sequence + inner sequence + 3'  sequence

SEQ ID NO: 47499 - DNA, 76 bp, Artificial Sequence
  Description of Artificial Sequence: Synthetic whey; 5' sequence + inner sequence + 3'  sequence
tagggaagagaaggacatatgatacgtcaaaacgcagtgcatcacgttgcgcattgactagtacatgaccacttga

SEQ ID NO: 47500 - DNA, 76 bp, Artificial Sequence
  Description of Artificial Sequence: Synthetic whey; 5' sequence + inner sequence + 3'  sequence
tagggaagagaaggacatatgatgtcatgccatcccttcgagtgtgaccggtattgactagtacatgaccacttga

SEQ ID NO: 47501 - DNA, 76 bp, Artificial Sequence; identical to SEQ ID NO: 8001
  Description of Artificial Sequence: Synthetic whey; 5' sequence + inner sequence + 3'  sequence

SEQ ID NO: 47502 - DNA, 76 bp, Artificial Sequence; identical to SEQ ID NO: 3551
  Description of Artificial Sequence: Synthetic whey; 5' sequence + inner sequence + 3'  sequence

SEQ ID NO: 47503 - DNA, 76 bp, Artificial Sequence; identical to SEQ ID NO: 35190
  Description of Artificial Sequence: Synthetic whey; 5' sequence + inner sequence + 3'  sequence

SEQ ID NO: 47504 - DNA, 76 bp, Artificial Sequence; identical to SEQ ID NO: 31874
  Description of Artificial Sequence: Synthetic whey; 5' sequence + inner sequence + 3'  sequence

SEQ ID NO: 47505 - DNA, 76 bp, Artificial Sequence; identical to SEQ ID NO: 23269
  Description of Artificial Sequence: Synthetic whey; 5' sequence + inner sequence + 3'  sequence

SEQ ID NO: 47506 - DNA, 76 bp, Artificial Sequence; identical to SEQ ID NO: 31860
  Description of Artificial Sequence: Synthetic whey; 5' sequence + inner sequence + 3'  sequence

SEQ ID NO: 47507 - DNA, 76 bp, Artificial Sequence
  Description of Artificial Sequence: Synthetic whey; 5' sequence + inner sequence + 3'  sequence
tagggaagagaaggacatatgatggacgactcgcaccctatcatgtaggcatgttgactagtacatgaccacttga

SEQ ID NO: 47508 - DNA, 76 bp, Artificial Sequence; identical to SEQ ID NO: 3324
  Description of Artificial Sequence: Synthetic whey; 5' sequence + inner sequence + 3'  sequence

SEQ ID NO: 47509 - DNA, 76 bp, Artificial Sequence
  Description of Artificial Sequence: Synthetic whey; 5' sequence + inner sequence + 3'  sequence
tagggaagagaaggacatatgatcgtgacgtaacggcaaggtgaccatgcacattgactagtacatgaccacttga

SEQ ID NO: 47510 - DNA, 76 bp, Artificial Sequence; identical to SEQ ID NO: 3580
  Description of Artificial Sequence: Synthetic whey; 5' sequence + inner sequence + 3'  sequence

SEQ ID NO: 47511 - DNA, 76 bp, Artificial Sequence
  Description of Artificial Sequence: Synthetic whey; 5' sequence + inner sequence + 3'  sequence
tagggaagagaaggacatatgatgtcatgccatcccttctagtgtgacaggtattgactagtacatgaccacttga

SEQ ID NO: 47512 - DNA, 76 bp, Artificial Sequence; identical to SEQ ID NO: 3868
  Description of Artificial Sequence: Synthetic whey; 5' sequence + inner sequence + 3'  sequence

SEQ ID NO: 47513 - DNA, 76 bp, Artificial Sequence; identical to SEQ ID NO: 23286
  Description of Artificial Sequence: Synthetic whey; 5' sequence + inner sequence + 3'  sequence

SEQ ID NO: 47514 - DNA, 76 bp, Artificial Sequence; identical to SEQ ID NO: 31780
  Description of Artificial Sequence: Synthetic whey; 5' sequence + inner sequence + 3'  sequence

SEQ ID NO: 47515 - DNA, 76 bp, Artificial Sequence; identical to SEQ ID NO: 7918
  Description of Artificial Sequence: Synthetic whey; 5' sequence + inner sequence + 3'  sequence

SEQ ID NO: 47516 - DNA, 76 bp, Artificial Sequence; identical to SEQ ID NO: 19265
  Description of Artificial Sequence: Synthetic whey; 5' sequence + inner sequence + 3'  sequence

SEQ ID NO: 47517 - DNA, 76 bp, Artificial Sequence; identical to SEQ ID NO: 3945
  Description of Artificial Sequence: Synthetic whey; 5' sequence + inner sequence + 3'  sequence

SEQ ID NO: 47518 - DNA, 76 bp, Artificial Sequence; identical to SEQ ID NO: 11938
  Description of Artificial Sequence: Synthetic whey; 5' sequence + inner sequence + 3'  sequence

SEQ ID NO: 47519 - DNA, 76 bp, Artificial Sequence; identical to SEQ ID NO: 15659
  Description of Artificial Sequence: Synthetic whey; 5' sequence + inner sequence + 3'  sequence

SEQ ID NO: 47520 - DNA, 76 bp, Artificial Sequence; identical to SEQ ID NO: 7997
  Description of Artificial Sequence: Synthetic whey; 5' sequence + inner sequence + 3'  sequence

SEQ ID NO: 47521 - DNA, 76 bp, Artificial Sequence
  Description of Artificial Sequence: Synthetic whey; 5' sequence + inner sequence + 3'  sequence
tagggaagagaaggacatatgatgtcatgccatcccttcgagtgttacaggtattgactagtacatgaccacttga

SEQ ID NO: 47522 - DNA, 76 bp, Artificial Sequence; identical to SEQ ID NO: 23229
  Description of Artificial Sequence: Synthetic whey; 5' sequence + inner sequence + 3'  sequence

SEQ ID NO: 47523 - DNA, 76 bp, Artificial Sequence; identical to SEQ ID NO: 23784
  Description of Artificial Sequence: Synthetic whey; 5' sequence + inner sequence + 3'  sequence

SEQ ID NO: 47524 - DNA, 76 bp, Artificial Sequence
  Description of Artificial Sequence: Synthetic whey; 5' sequence + inner sequence + 3'  sequence
tagggaagagaaggacatatgatacgtcaacatggcgcggttcgtaacgcacattgactagtacatgaccacttga

SEQ ID NO: 47525 - DNA, 76 bp, Artificial Sequence; identical to SEQ ID NO: 3173
  Description of Artificial Sequence: Synthetic whey; 5' sequence + inner sequence + 3'  sequence

SEQ ID NO: 47526 - DNA, 76 bp, Artificial Sequence; identical to SEQ ID NO: 3140
  Description of Artificial Sequence: Synthetic whey; 5' sequence + inner sequence + 3'  sequence

SEQ ID NO: 47527 - DNA, 76 bp, Artificial Sequence
  Description of Artificial Sequence: Synthetic whey; 5' sequence + inner sequence + 3'  sequence
tagggaagagaaggacatatgatgcacttcacgcaccctatcatgtaggcatgttgactagtacatgaccacttga

SEQ ID NO: 47528 - DNA, 72 bp, Artificial Sequence; identical to SEQ ID NO: 3893
  Description of Artificial Sequence: Synthetic whey; 5' sequence + inner sequence + 3'  sequence

SEQ ID NO: 47529 - DNA, 76 bp, Artificial Sequence; identical to SEQ ID NO: 7420
  Description of Artificial Sequence: Synthetic whey; 5' sequence + inner sequence + 3'  sequence

SEQ ID NO: 47530 - DNA, 76 bp, Artificial Sequence; identical to SEQ ID NO: 8002
  Description of Artificial Sequence: Synthetic whey; 5' sequence + inner sequence + 3'  sequence

SEQ ID NO: 47531 - DNA, 76 bp, Artificial Sequence
  Description of Artificial Sequence: Synthetic whey; 5' sequence + inner sequence + 3'  sequence
tagggaagagaaggacatatgatgtacgcatcgtcccgccatgtggttccgtattgactagtacatgaccacttga

SEQ ID NO: 47532 - DNA, 76 bp, Artificial Sequence; identical to SEQ ID NO: 3828
  Description of Artificial Sequence: Synthetic whey; 5' sequence + inner sequence + 3'  sequence

SEQ ID NO: 47533 - DNA, 75 bp, Artificial Sequence
  Description of Artificial Sequence: Synthetic whey; 5' sequence + inner sequence + 3'  sequence
tagggaagagaaggacatatgatcgatacggcatgatcgtacgtgctgctgcttgactagtacatgaccacttga

SEQ ID NO: 47534 - DNA, 76 bp, Artificial Sequence; identical to SEQ ID NO: 23972
  Description of Artificial Sequence: Synthetic whey; 5' sequence + inner sequence + 3'  sequence

SEQ ID NO: 47535 - DNA, 76 bp, Artificial Sequence; identical to SEQ ID NO: 23988
  Description of Artificial Sequence: Synthetic whey; 5' sequence + inner sequence + 3'  sequence

SEQ ID NO: 47536 - DNA, 76 bp, Artificial Sequence; identical to SEQ ID NO: 39797
  Description of Artificial Sequence: Synthetic whey; 5' sequence + inner sequence + 3'  sequence

SEQ ID NO: 47537 - DNA, 76 bp, Artificial Sequence; identical to SEQ ID NO: 19352
  Description of Artificial Sequence: Synthetic whey; 5' sequence + inner sequence + 3'  sequence

SEQ ID NO: 47538 - DNA, 76 bp, Artificial Sequence; identical to SEQ ID NO: 3105
  Description of Artificial Sequence: Synthetic whey; 5' sequence + inner sequence + 3'  sequence

SEQ ID NO: 47539 - DNA, 76 bp, Artificial Sequence; identical to SEQ ID NO: 3270
  Description of Artificial Sequence: Synthetic whey; 5' sequence + inner sequence + 3'  sequence

SEQ ID NO: 47540 - DNA, 76 bp, Artificial Sequence; identical to SEQ ID NO: 3042
  Description of Artificial Sequence: Synthetic whey; 5' sequence + inner sequence + 3'  sequence

SEQ ID NO: 47541 - DNA, 76 bp, Artificial Sequence; identical to SEQ ID NO: 39768
  Description of Artificial Sequence: Synthetic whey; 5' sequence + inner sequence + 3'  sequence

SEQ ID NO: 47542 - DNA, 76 bp, Artificial Sequence
  Description of Artificial Sequence: Synthetic whey; 5' sequence + inner sequence + 3'  sequence
tagggaagagaaggacatatgatacgtcgcatgcgtaacgtacgtccatcgcgttgactagtacatgaccacttga

SEQ ID NO: 47543 - DNA, 76 bp, Artificial Sequence; identical to SEQ ID NO: 3106
  Description of Artificial Sequence: Synthetic whey; 5' sequence + inner sequence + 3'  sequence

SEQ ID NO: 47544 - DNA, 76 bp, Artificial Sequence
  Description of Artificial Sequence: Synthetic whey; 5' sequence + inner sequence + 3'  sequence
tagggaagagaaggacatatgatacgtcacacaacggtacgtatgcactgcgtttgactagtacatgaccacttga

SEQ ID NO: 47545 - DNA, 76 bp, Artificial Sequence
  Description of Artificial Sequence: Synthetic whey; 5' sequence + inner sequence + 3'  sequence
tagggaagagaaggacatatgatccatagcgtcactatcatgtgtgtcacgtattgactagtacatgaccacttga

SEQ ID NO: 47546 - DNA, 76 bp, Artificial Sequence; identical to SEQ ID NO: 19726
  Description of Artificial Sequence: Synthetic whey; 5' sequence + inner sequence + 3'  sequence

SEQ ID NO: 47547 - DNA, 76 bp, Artificial Sequence
  Description of Artificial Sequence: Synthetic whey; 5' sequence + inner sequence + 3'  sequence
tagggaagagaaggacatatgatgggcacagcgtacctcaacgtggacgtgcattgactagtacatgaccacttga

SEQ ID NO: 47548 - DNA, 76 bp, Artificial Sequence; identical to SEQ ID NO: 31688
  Description of Artificial Sequence: Synthetic whey; 5' sequence + inner sequence + 3'  sequence

SEQ ID NO: 47549 - DNA, 76 bp, Artificial Sequence
  Description of Artificial Sequence: Synthetic whey; 5' sequence + inner sequence + 3'  sequence
tagggaagagaaggacatatgatcgtgacgtagcgaggcgtactgcatgcgcgttgactagtacatgaccacttga

SEQ ID NO: 47550 - DNA, 76 bp, Artificial Sequence; identical to SEQ ID NO: 31582
  Description of Artificial Sequence: Synthetic whey; 5' sequence + inner sequence + 3'  sequence

SEQ ID NO: 47551 - DNA, 76 bp, Artificial Sequence; identical to SEQ ID NO: 7707
  Description of Artificial Sequence: Synthetic whey; 5' sequence + inner sequence + 3'  sequence

SEQ ID NO: 47552 - DNA, 76 bp, Artificial Sequence
  Description of Artificial Sequence: Synthetic whey; 5' sequence + inner sequence + 3'  sequence
tagggaagagaaggacatatgatcgtgcacacgacaggatacgttgcgacacgttgactagtacatgaccacttga

SEQ ID NO: 47553 - DNA, 76 bp, Artificial Sequence; identical to SEQ ID NO: 23817
  Description of Artificial Sequence: Synthetic whey; 5' sequence + inner sequence + 3'  sequence

SEQ ID NO: 47554 - DNA, 76 bp, Artificial Sequence; identical to SEQ ID NO: 23880
  Description of Artificial Sequence: Synthetic whey; 5' sequence + inner sequence + 3'  sequence

SEQ ID NO: 47555 - DNA, 76 bp, Artificial Sequence
  Description of Artificial Sequence: Synthetic whey; 5' sequence + inner sequence + 3'  sequence
tagggaagagaaggacatatgatcgtacacactgacgacatacgtgctgcacattgactagtacatgaccacttga

SEQ ID NO: 47556 - DNA, 76 bp, Artificial Sequence
  Description of Artificial Sequence: Synthetic whey; 5' sequence + inner sequence + 3'  sequence
tagggaagagaaggacatatgatgtcactgtgcctgaccgacaagttgcggcattgactagtacatgaccacttga

SEQ ID NO: 47557 - DNA, 76 bp, Artificial Sequence; identical to SEQ ID NO: 31503
  Description of Artificial Sequence: Synthetic whey; 5' sequence + inner sequence + 3'  sequence

SEQ ID NO: 47558 - DNA, 76 bp, Artificial Sequence; identical to SEQ ID NO: 23417
  Description of Artificial Sequence: Synthetic whey; 5' sequence + inner sequence + 3'  sequence

SEQ ID NO: 47559 - DNA, 76 bp, Artificial Sequence; identical to SEQ ID NO: 23580
  Description of Artificial Sequence: Synthetic whey; 5' sequence + inner sequence + 3'  sequence

SEQ ID NO: 47560 - DNA, 76 bp, Artificial Sequence
  Description of Artificial Sequence: Synthetic whey; 5' sequence + inner sequence + 3'  sequence
tagggaagagaaggacatatgattgcgtgtcgtacgcatacgtgtgctgcgtgttgactagtacatgaccacttga

SEQ ID NO: 47561 - DNA, 76 bp, Artificial Sequence
  Description of Artificial Sequence: Synthetic whey; 5' sequence + inner sequence + 3'  sequence
tagggaagagaaggacatatgatgtccgcatcgtcccgtcatgtggttccgtattgactagtacatgaccacttga

SEQ ID NO: 47562 - DNA, 76 bp, Artificial Sequence; identical to SEQ ID NO: 23410
  Description of Artificial Sequence: Synthetic whey; 5' sequence + inner sequence + 3'  sequence

SEQ ID NO: 47563 - DNA, 76 bp, Artificial Sequence; identical to SEQ ID NO: 3559
  Description of Artificial Sequence: Synthetic whey; 5' sequence + inner sequence + 3'  sequence

SEQ ID NO: 47564 - DNA, 76 bp, Artificial Sequence; identical to SEQ ID NO: 3661
  Description of Artificial Sequence: Synthetic whey; 5' sequence + inner sequence + 3'  sequence

SEQ ID NO: 47565 - DNA, 76 bp, Artificial Sequence
  Description of Artificial Sequence: Synthetic whey; 5' sequence + inner sequence + 3'  sequence
tagggaagagaaggacatatgatgcacgcctcgcaccctatcatgtaggcatgttgactagtacatgaccacttga

SEQ ID NO: 47566 - DNA, 76 bp, Artificial Sequence; identical to SEQ ID NO: 3247
  Description of Artificial Sequence: Synthetic whey; 5' sequence + inner sequence + 3'  sequence

SEQ ID NO: 47567 - DNA, 76 bp, Artificial Sequence; identical to SEQ ID NO: 7229
  Description of Artificial Sequence: Synthetic whey; 5' sequence + inner sequence + 3'  sequence

SEQ ID NO: 47568 - DNA, 76 bp, Artificial Sequence; identical to SEQ ID NO: 3236
  Description of Artificial Sequence: Synthetic whey; 5' sequence + inner sequence + 3'  sequence

SEQ ID NO: 47569 - DNA, 76 bp, Artificial Sequence; identical to SEQ ID NO: 3543
  Description of Artificial Sequence: Synthetic whey; 5' sequence + inner sequence + 3'  sequence

SEQ ID NO: 47570 - DNA, 77 bp, Artificial Sequence; identical to SEQ ID NO: 3250
  Description of Artificial Sequence: Synthetic whey; 5' sequence + inner sequence + 3'  sequence

SEQ ID NO: 47571 - DNA, 76 bp, Artificial Sequence; identical to SEQ ID NO: 19950
  Description of Artificial Sequence: Synthetic whey; 5' sequence + inner sequence + 3'  sequence

SEQ ID NO: 47572 - DNA, 76 bp, Artificial Sequence; identical to SEQ ID NO: 3913
  Description of Artificial Sequence: Synthetic whey; 5' sequence + inner sequence + 3'  sequence

SEQ ID NO: 47573 - DNA, 76 bp, Artificial Sequence; identical to SEQ ID NO: 7867
  Description of Artificial Sequence: Synthetic whey; 5' sequence + inner sequence + 3'  sequence

SEQ ID NO: 47574 - DNA, 76 bp, Artificial Sequence; identical to SEQ ID NO: 31739
  Description of Artificial Sequence: Synthetic whey; 5' sequence + inner sequence + 3'  sequence

SEQ ID NO: 47575 - DNA, 76 bp, Artificial Sequence; identical to SEQ ID NO: 23372
  Description of Artificial Sequence: Synthetic whey; 5' sequence + inner sequence + 3'  sequence

SEQ ID NO: 47576 - DNA, 76 bp, Artificial Sequence; identical to SEQ ID NO: 31672
  Description of Artificial Sequence: Synthetic whey; 5' sequence + inner sequence + 3'  sequence

SEQ ID NO: 47577 - DNA, 76 bp, Artificial Sequence
  Description of Artificial Sequence: Synthetic whey; 5' sequence + inner sequence + 3'  sequence
tagggaagagaaggacatatgatcgagacaacgtgacgtgccgatgcgacgcgttgactagtacatgaccacttga

SEQ ID NO: 47578 - DNA, 76 bp, Artificial Sequence; identical to SEQ ID NO: 3139
  Description of Artificial Sequence: Synthetic whey; 5' sequence + inner sequence + 3'  sequence

SEQ ID NO: 47579 - DNA, 76 bp, Artificial Sequence; identical to SEQ ID NO: 31914
  Description of Artificial Sequence: Synthetic whey; 5' sequence + inner sequence + 3'  sequence

SEQ ID NO: 47580 - DNA, 76 bp, Artificial Sequence
  Description of Artificial Sequence: Synthetic whey; 5' sequence + inner sequence + 3'  sequence
tagggaagagaaggacatatgatcgtgcgcatggcagcatacgtccgtacgcgttgactagtacatgaccacttga

SEQ ID NO: 47581 - DNA, 76 bp, Artificial Sequence; identical to SEQ ID NO: 23979
  Description of Artificial Sequence: Synthetic whey; 5' sequence + inner sequence + 3'  sequence

SEQ ID NO: 47582 - DNA, 76 bp, Artificial Sequence
  Description of Artificial Sequence: Synthetic whey; 5' sequence + inner sequence + 3'  sequence
tagggaagagaaggacatatgatacgatgcggcacaacgtcacgtacgtagcgttgactagtacatgaccacttga

SEQ ID NO: 47583 - DNA, 76 bp, Artificial Sequence
  Description of Artificial Sequence: Synthetic whey; 5' sequence + inner sequence + 3'  sequence
tagggaagagaaggacatatgatttcatgcacgaacactatcatggcggcatgttgactagtacatgaccacttga

SEQ ID NO: 47584 - DNA, 76 bp, Artificial Sequence; identical to SEQ ID NO: 3122
  Description of Artificial Sequence: Synthetic whey; 5' sequence + inner sequence + 3'  sequence

SEQ ID NO: 47585 - DNA, 76 bp, Artificial Sequence; identical to SEQ ID NO: 31805
  Description of Artificial Sequence: Synthetic whey; 5' sequence + inner sequence + 3'  sequence

SEQ ID NO: 47586 - DNA, 76 bp, Artificial Sequence; identical to SEQ ID NO: 3124
  Description of Artificial Sequence: Synthetic whey; 5' sequence + inner sequence + 3'  sequence

SEQ ID NO: 47587 - DNA, 76 bp, Artificial Sequence; identical to SEQ ID NO: 3196
  Description of Artificial Sequence: Synthetic whey; 5' sequence + inner sequence + 3'  sequence

SEQ ID NO: 47588 - DNA, 76 bp, Artificial Sequence; identical to SEQ ID NO: 3287
  Description of Artificial Sequence: Synthetic whey; 5' sequence + inner sequence + 3'  sequence

SEQ ID NO: 47589 - DNA, 76 bp, Artificial Sequence; identical to SEQ ID NO: 3064
  Description of Artificial Sequence: Synthetic whey; 5' sequence + inner sequence + 3'  sequence

SEQ ID NO: 47590 - DNA, 76 bp, Artificial Sequence; identical to SEQ ID NO: 19688
  Description of Artificial Sequence: Synthetic whey; 5' sequence + inner sequence + 3'  sequence

SEQ ID NO: 47591 - DNA, 76 bp, Artificial Sequence; identical to SEQ ID NO: 3032
  Description of Artificial Sequence: Synthetic whey; 5' sequence + inner sequence + 3'  sequence

SEQ ID NO: 47592 - DNA, 76 bp, Artificial Sequence; identical to SEQ ID NO: 3248
  Description of Artificial Sequence: Synthetic whey; 5' sequence + inner sequence + 3'  sequence

SEQ ID NO: 47593 - DNA, 76 bp, Artificial Sequence; identical to SEQ ID NO: 3154
  Description of Artificial Sequence: Synthetic whey; 5' sequence + inner sequence + 3'  sequence

SEQ ID NO: 47594 - DNA, 76 bp, Artificial Sequence; identical to SEQ ID NO: 31806
  Description of Artificial Sequence: Synthetic whey; 5' sequence + inner sequence + 3'  sequence

SEQ ID NO: 47595 - DNA, 76 bp, Artificial Sequence
  Description of Artificial Sequence: Synthetic whey; 5' sequence + inner sequence + 3'  sequence
tagggaagagaaggacatatgatgtcactgtgcctgaccgccaagttgcggcattgactagtacatgaccacttga

SEQ ID NO: 47596 - DNA, 76 bp, Artificial Sequence
  Description of Artificial Sequence: Synthetic whey; 5' sequence + inner sequence + 3'  sequence
tagggaagagaaggacatatgatgtcattgtgcctgaccgtcaagttgcggcattgactagtacatgaccacttga

SEQ ID NO: 47597 - DNA, 76 bp, Artificial Sequence
  Description of Artificial Sequence: Synthetic whey; 5' sequence + inner sequence + 3'  sequence
tagggaagagaaggacatatgatggacgcaacgtaccgcatcgtggccatgtattgactagtacatgaccacttga

SEQ ID NO: 47598 - DNA, 76 bp, Artificial Sequence; identical to SEQ ID NO: 31959
  Description of Artificial Sequence: Synthetic whey; 5' sequence + inner sequence + 3'  sequence

SEQ ID NO: 47599 - DNA, 76 bp, Artificial Sequence
  Description of Artificial Sequence: Synthetic whey; 5' sequence + inner sequence + 3'  sequence
tagggaagagaaggacatatgatacgacggcacgacgtaagcatgacggtgtgttgactagtacatgaccacttga

SEQ ID NO: 47600 - DNA, 76 bp, Artificial Sequence; identical to SEQ ID NO: 3928
  Description of Artificial Sequence: Synthetic whey; 5' sequence + inner sequence + 3'  sequence

SEQ ID NO: 47601 - DNA, 76 bp, Artificial Sequence; identical to SEQ ID NO: 3420
  Description of Artificial Sequence: Synthetic whey; 5' sequence + inner sequence + 3'  sequence

SEQ ID NO: 47602 - DNA, 76 bp, Artificial Sequence
  Description of Artificial Sequence: Synthetic whey; 5' sequence + inner sequence + 3'  sequence
tagggaagagaaggacatatgatcgtgacaacgttgcgacatcatgctgcacgttgactagtacatgaccacttga

SEQ ID NO: 47603 - DNA, 76 bp, Artificial Sequence; identical to SEQ ID NO: 11953
  Description of Artificial Sequence: Synthetic whey; 5' sequence + inner sequence + 3'  sequence

SEQ ID NO: 47604 - DNA, 76 bp, Artificial Sequence; identical to SEQ ID NO: 23502
  Description of Artificial Sequence: Synthetic whey; 5' sequence + inner sequence + 3'  sequence

SEQ ID NO: 47605 - DNA, 74 bp, Artificial Sequence; identical to SEQ ID NO: 7786
  Description of Artificial Sequence: Synthetic whey; 5' sequence + inner sequence + 3'  sequence

SEQ ID NO: 47606 - DNA, 76 bp, Artificial Sequence; identical to SEQ ID NO: 3076
  Description of Artificial Sequence: Synthetic whey; 5' sequence + inner sequence + 3'  sequence

SEQ ID NO: 47607 - DNA, 76 bp, Artificial Sequence; identical to SEQ ID NO: 31907
  Description of Artificial Sequence: Synthetic whey; 5' sequence + inner sequence + 3'  sequence

SEQ ID NO: 47608 - DNA, 76 bp, Artificial Sequence; identical to SEQ ID NO: 15821
  Description of Artificial Sequence: Synthetic whey; 5' sequence + inner sequence + 3'  sequence

SEQ ID NO: 47609 - DNA, 76 bp, Artificial Sequence
  Description of Artificial Sequence: Synthetic whey; 5' sequence + inner sequence + 3'  sequence
tagggaagagaaggacatatgattgacgcaacgtaccgtatcgtggccatgtattgactagtacatgaccacttga

SEQ ID NO: 47610 - DNA, 76 bp, Artificial Sequence
  Description of Artificial Sequence: Synthetic whey; 5' sequence + inner sequence + 3'  sequence
tagggaagagaaggacatatgatggacgccacgtaccgtatcgtggccatgtattgactagtacatgaccacttga

SEQ ID NO: 47611 - DNA, 76 bp, Artificial Sequence
  Description of Artificial Sequence: Synthetic whey; 5' sequence + inner sequence + 3'  sequence
tagggaagagaaggacatatgatcacgtgacgtacgtagcagtgtggccgatcttgactagtacatgaccacttga

SEQ ID NO: 47612 - DNA, 76 bp, Artificial Sequence; identical to SEQ ID NO: 3678
  Description of Artificial Sequence: Synthetic whey; 5' sequence + inner sequence + 3'  sequence

SEQ ID NO: 47613 - DNA, 76 bp, Artificial Sequence; identical to SEQ ID NO: 35191
  Description of Artificial Sequence: Synthetic whey; 5' sequence + inner sequence + 3'  sequence

SEQ ID NO: 47614 - DNA, 76 bp, Artificial Sequence
  Description of Artificial Sequence: Synthetic whey; 5' sequence + inner sequence + 3'  sequence
tagggaagagaaggacatatgatgacacacagtgacgtcaccatgccgtatcgttgactagtacatgaccacttga

SEQ ID NO: 47615 - DNA, 76 bp, Artificial Sequence; identical to SEQ ID NO: 3099
  Description of Artificial Sequence: Synthetic whey; 5' sequence + inner sequence + 3'  sequence

SEQ ID NO: 47616 - DNA, 76 bp, Artificial Sequence; identical to SEQ ID NO: 3136
  Description of Artificial Sequence: Synthetic whey; 5' sequence + inner sequence + 3'  sequence

SEQ ID NO: 47617 - DNA, 76 bp, Artificial Sequence; identical to SEQ ID NO: 23515
  Description of Artificial Sequence: Synthetic whey; 5' sequence + inner sequence + 3'  sequence

SEQ ID NO: 47618 - DNA, 76 bp, Artificial Sequence; identical to SEQ ID NO: 7940
  Description of Artificial Sequence: Synthetic whey; 5' sequence + inner sequence + 3'  sequence

SEQ ID NO: 47619 - DNA, 76 bp, Artificial Sequence
  Description of Artificial Sequence: Synthetic whey; 5' sequence + inner sequence + 3'  sequence
tagggaagagaaggacatatgatgtacgcatcttcccgtcatgtggttccgtattgactagtacatgaccacttga

SEQ ID NO: 47620 - DNA, 76 bp, Artificial Sequence
  Description of Artificial Sequence: Synthetic whey; 5' sequence + inner sequence + 3'  sequence
tagggaagagaaggacatatgatgtcactgtgcctgaccgtcaaggtgcggcattgactagtacatgaccacttga

SEQ ID NO: 47621 - DNA, 76 bp, Artificial Sequence; identical to SEQ ID NO: 3291
  Description of Artificial Sequence: Synthetic whey; 5' sequence + inner sequence + 3'  sequence

SEQ ID NO: 47622 - DNA, 76 bp, Artificial Sequence; identical to SEQ ID NO: 31677
  Description of Artificial Sequence: Synthetic whey; 5' sequence + inner sequence + 3'  sequence

SEQ ID NO: 47623 - DNA, 76 bp, Artificial Sequence
  Description of Artificial Sequence: Synthetic whey; 5' sequence + inner sequence + 3'  sequence
tagggaagagaaggacatatgatgcgttacggtgcacgagtacgtccttcgcgttgactagtacatgaccacttga

SEQ ID NO: 47624 - DNA, 76 bp, Artificial Sequence; identical to SEQ ID NO: 31312
  Description of Artificial Sequence: Synthetic whey; 5' sequence + inner sequence + 3'  sequence

SEQ ID NO: 47625 - DNA, 76 bp, Artificial Sequence; identical to SEQ ID NO: 7790
  Description of Artificial Sequence: Synthetic whey; 5' sequence + inner sequence + 3'  sequence

SEQ ID NO: 47626 - DNA, 72 bp, Artificial Sequence
  Description of Artificial Sequence: Synthetic whey; 5' sequence + inner sequence + 3'  sequence
tagggaagagaaggacatatgatgtcatgccatcccttcgagtgtgacattgactagtacatgaccacttga

SEQ ID NO: 47627 - DNA, 76 bp, Artificial Sequence
  Description of Artificial Sequence: Synthetic whey; 5' sequence + inner sequence + 3'  sequence
tagggaagagaaggacatatgatggacgcaacgtaccgtatcgtgtccatgtattgactagtacatgaccacttga

SEQ ID NO: 47628 - DNA, 76 bp, Artificial Sequence; identical to SEQ ID NO: 31979
  Description of Artificial Sequence: Synthetic whey; 5' sequence + inner sequence + 3'  sequence

SEQ ID NO: 47629 - DNA, 76 bp, Artificial Sequence; identical to SEQ ID NO: 3688
  Description of Artificial Sequence: Synthetic whey; 5' sequence + inner sequence + 3'  sequence

SEQ ID NO: 47630 - DNA, 76 bp, Artificial Sequence; identical to SEQ ID NO: 19677
  Description of Artificial Sequence: Synthetic whey; 5' sequence + inner sequence + 3'  sequence

SEQ ID NO: 47631 - DNA, 76 bp, Artificial Sequence; identical to SEQ ID NO: 31791
  Description of Artificial Sequence: Synthetic whey; 5' sequence + inner sequence + 3'  sequence

SEQ ID NO: 47632 - DNA, 76 bp, Artificial Sequence; identical to SEQ ID NO: 31846
  Description of Artificial Sequence: Synthetic whey; 5' sequence + inner sequence + 3'  sequence

SEQ ID NO: 47633 - DNA, 76 bp, Artificial Sequence; identical to SEQ ID NO: 3751
  Description of Artificial Sequence: Synthetic whey; 5' sequence + inner sequence + 3'  sequence

SEQ ID NO: 47634 - DNA, 76 bp, Artificial Sequence
  Description of Artificial Sequence: Synthetic whey; 5' sequence + inner sequence + 3'  sequence
tagggaagagaaggacatatgatgtacgcatcgtcccgtcatgtggttccgtgttgactagtacatgaccacttga

SEQ ID NO: 47635 - DNA, 76 bp, Artificial Sequence
  Description of Artificial Sequence: Synthetic whey; 5' sequence + inner sequence + 3'  sequence
tagggaagagaaggacatatgatgtcaatgtgcctgaccgtcaagttgcggcattgactagtacatgaccacttga

SEQ ID NO: 47636 - DNA, 76 bp, Artificial Sequence
  Description of Artificial Sequence: Synthetic whey; 5' sequence + inner sequence + 3'  sequence
tagggaagagaaggacatatgatgtcactgtgcctgacagtcaagttgcggcattgactagtacatgaccacttga

SEQ ID NO: 47637 - DNA, 76 bp, Artificial Sequence
  Description of Artificial Sequence: Synthetic whey; 5' sequence + inner sequence + 3'  sequence
tagggaagagaaggacatatgatggccacagagtacctcaacgtggacgtgcattgactagtacatgaccacttga

SEQ ID NO: 47638 - DNA, 76 bp, Artificial Sequence; identical to SEQ ID NO: 19531
  Description of Artificial Sequence: Synthetic whey; 5' sequence + inner sequence + 3'  sequence

SEQ ID NO: 47639 - DNA, 76 bp, Artificial Sequence
  Description of Artificial Sequence: Synthetic whey; 5' sequence + inner sequence + 3'  sequence
tagggaagagaaggacatatgatgtcatgccatcccttcgagtgcgtcacgtattgactagtacatgaccacttga

SEQ ID NO: 47640 - DNA, 76 bp, Artificial Sequence
  Description of Artificial Sequence: Synthetic whey; 5' sequence + inner sequence + 3'  sequence
tagggaagagaaggacatatgatgtcatgccatcccttcgagtgtgacacgtattgactagtacatgaccacttga

SEQ ID NO: 47641 - DNA, 76 bp, Artificial Sequence
  Description of Artificial Sequence: Synthetic whey; 5' sequence + inner sequence + 3'  sequence
tagggaagagaaggacatatgatcgtgacgatgcgtaacatacgtgctgcctcttgactagtacatgaccacttga

SEQ ID NO: 47642 - DNA, 76 bp, Artificial Sequence
  Description of Artificial Sequence: Synthetic whey; 5' sequence + inner sequence + 3'  sequence
tagggaagagaaggacatatgatacgtcacggtgacgtaacggcgcgcacacgttgactagtacatgaccacttga

SEQ ID NO: 47643 - DNA, 76 bp, Artificial Sequence
  Description of Artificial Sequence: Synthetic whey; 5' sequence + inner sequence + 3'  sequence
tagggaagagaaggacatatgatgtcaccgtgcctgaccgtcaagttgcggcattgactagtacatgaccacttga

SEQ ID NO: 47644 - DNA, 76 bp, Artificial Sequence; identical to SEQ ID NO: 23430
  Description of Artificial Sequence: Synthetic whey; 5' sequence + inner sequence + 3'  sequence

SEQ ID NO: 47645 - DNA, 76 bp, Artificial Sequence; identical to SEQ ID NO: 23346
  Description of Artificial Sequence: Synthetic whey; 5' sequence + inner sequence + 3'  sequence

SEQ ID NO: 47646 - DNA, 76 bp, Artificial Sequence; identical to SEQ ID NO: 31705
  Description of Artificial Sequence: Synthetic whey; 5' sequence + inner sequence + 3'  sequence

SEQ ID NO: 47647 - DNA, 76 bp, Artificial Sequence; identical to SEQ ID NO: 31670
  Description of Artificial Sequence: Synthetic whey; 5' sequence + inner sequence + 3'  sequence

SEQ ID NO: 47648 - DNA, 76 bp, Artificial Sequence; identical to SEQ ID NO: 35193
  Description of Artificial Sequence: Synthetic whey; 5' sequence + inner sequence + 3'  sequence

SEQ ID NO: 47649 - DNA, 76 bp, Artificial Sequence; identical to SEQ ID NO: 23594
  Description of Artificial Sequence: Synthetic whey; 5' sequence + inner sequence + 3'  sequence

SEQ ID NO: 47650 - DNA, 76 bp, Artificial Sequence
  Description of Artificial Sequence: Synthetic whey; 5' sequence + inner sequence + 3'  sequence
tagggaagagaaggacatatgattgacgtgaggcaacgtgcagacgtgacgcattgactagtacatgaccacttga

SEQ ID NO: 47651 - DNA, 76 bp, Artificial Sequence
  Description of Artificial Sequence: Synthetic whey; 5' sequence + inner sequence + 3'  sequence
tagggaagagaaggacatatgatggcactgtgcctgaccgtcaagttgcggcattgactagtacatgaccacttga

SEQ ID NO: 47652 - DNA, 76 bp, Artificial Sequence
  Description of Artificial Sequence: Synthetic whey; 5' sequence + inner sequence + 3'  sequence
tagggaagagaaggacatatgatgtacgcatcgttccgtcatgtggttccgtattgactagtacatgaccacttga

SEQ ID NO: 47653 - DNA, 76 bp, Artificial Sequence; identical to SEQ ID NO: 23596
  Description of Artificial Sequence: Synthetic whey; 5' sequence + inner sequence + 3'  sequence

SEQ ID NO: 47654 - DNA, 76 bp, Artificial Sequence; identical to SEQ ID NO: 23923
  Description of Artificial Sequence: Synthetic whey; 5' sequence + inner sequence + 3'  sequence

SEQ ID NO: 47655 - DNA, 76 bp, Artificial Sequence
  Description of Artificial Sequence: Synthetic whey; 5' sequence + inner sequence + 3'  sequence
tagggaagagaaggacatatgatacatcgcgtcactatcatgtgtgtcacgtattgactagtacatgaccacttga

SEQ ID NO: 47656 - DNA, 76 bp, Artificial Sequence
  Description of Artificial Sequence: Synthetic whey; 5' sequence + inner sequence + 3'  sequence
tagggaagagaaggacatatgatcgatacgcaaggaccatgcgtgacttcgcgttgactagtacatgaccacttga

SEQ ID NO: 47657 - DNA, 76 bp, Artificial Sequence
  Description of Artificial Sequence: Synthetic whey; 5' sequence + inner sequence + 3'  sequence
tagggaagagaaggacatatgatcgacacgtagcacggcacgtcacgtcctgcttgactagtacatgaccacttga

SEQ ID NO: 47658 - DNA, 76 bp, Artificial Sequence; identical to SEQ ID NO: 35505
  Description of Artificial Sequence: Synthetic whey; 5' sequence + inner sequence + 3'  sequence

SEQ ID NO: 47659 - DNA, 76 bp, Artificial Sequence; identical to SEQ ID NO: 3998
  Description of Artificial Sequence: Synthetic whey; 5' sequence + inner sequence + 3'  sequence

SEQ ID NO: 47660 - DNA, 76 bp, Artificial Sequence; identical to SEQ ID NO: 11926
  Description of Artificial Sequence: Synthetic whey; 5' sequence + inner sequence + 3'  sequence

SEQ ID NO: 47661 - DNA, 76 bp, Artificial Sequence; identical to SEQ ID NO: 23960
  Description of Artificial Sequence: Synthetic whey; 5' sequence + inner sequence + 3'  sequence

SEQ ID NO: 47662 - DNA, 76 bp, Artificial Sequence
  Description of Artificial Sequence: Synthetic whey; 5' sequence + inner sequence + 3'  sequence
tagggaagagaaggacatatgatgtcatcccgcatcctacacgtgggcacgtattgactagtacatgaccacttga

SEQ ID NO: 47663 - DNA, 76 bp, Artificial Sequence
  Description of Artificial Sequence: Synthetic whey; 5' sequence + inner sequence + 3'  sequence
tagggaagagaaggacatatgatcgacaacgtgacgtgatgtggacgtgcgccttgactagtacatgaccacttga

SEQ ID NO: 47664 - DNA, 76 bp, Artificial Sequence; identical to SEQ ID NO: 20001
  Description of Artificial Sequence: Synthetic whey; 5' sequence + inner sequence + 3'  sequence

SEQ ID NO: 47665 - DNA, 76 bp, Artificial Sequence; identical to SEQ ID NO: 3162
  Description of Artificial Sequence: Synthetic whey; 5' sequence + inner sequence + 3'  sequence

SEQ ID NO: 47666 - DNA, 76 bp, Artificial Sequence; identical to SEQ ID NO: 23831
  Description of Artificial Sequence: Synthetic whey; 5' sequence + inner sequence + 3'  sequence

SEQ ID NO: 47667 - DNA, 76 bp, Artificial Sequence; identical to SEQ ID NO: 23795
  Description of Artificial Sequence: Synthetic whey; 5' sequence + inner sequence + 3'  sequence

SEQ ID NO: 47668 - DNA, 76 bp, Artificial Sequence
  Description of Artificial Sequence: Synthetic whey; 5' sequence + inner sequence + 3'  sequence
tagggaagagaaggacatatgatggacggaacgtaccgtatcgtggccatgtgttgactagtacatgaccacttga

SEQ ID NO: 47669 - DNA, 76 bp, Artificial Sequence; identical to SEQ ID NO: 3406
  Description of Artificial Sequence: Synthetic whey; 5' sequence + inner sequence + 3'  sequence

SEQ ID NO: 47670 - DNA, 76 bp, Artificial Sequence; identical to SEQ ID NO: 7837
  Description of Artificial Sequence: Synthetic whey; 5' sequence + inner sequence + 3'  sequence

SEQ ID NO: 47671 - DNA, 76 bp, Artificial Sequence; identical to SEQ ID NO: 31844
  Description of Artificial Sequence: Synthetic whey; 5' sequence + inner sequence + 3'  sequence

SEQ ID NO: 47672 - DNA, 76 bp, Artificial Sequence; identical to SEQ ID NO: 3452
  Description of Artificial Sequence: Synthetic whey; 5' sequence + inner sequence + 3'  sequence

SEQ ID NO: 47673 - DNA, 76 bp, Artificial Sequence; identical to SEQ ID NO: 3103
  Description of Artificial Sequence: Synthetic whey; 5' sequence + inner sequence + 3'  sequence

SEQ ID NO: 47674 - DNA, 76 bp, Artificial Sequence
  Description of Artificial Sequence: Synthetic whey; 5' sequence + inner sequence + 3'  sequence
tagggaagagaaggacatatgatggccatagcgtacctcaacgtggacgtgcattgactagtacatgaccacttga

SEQ ID NO: 47675 - DNA, 76 bp, Artificial Sequence; identical to SEQ ID NO: 3477
  Description of Artificial Sequence: Synthetic whey; 5' sequence + inner sequence + 3'  sequence

SEQ ID NO: 47676 - DNA, 76 bp, Artificial Sequence; identical to SEQ ID NO: 19573
  Description of Artificial Sequence: Synthetic whey; 5' sequence + inner sequence + 3'  sequence

SEQ ID NO: 47677 - DNA, 76 bp, Artificial Sequence
  Description of Artificial Sequence: Synthetic whey; 5' sequence + inner sequence + 3'  sequence
tagggaagagaaggacatatgatgtcactgagcctgaccgtcaagttgcggcattgactagtacatgaccacttga

SEQ ID NO: 47678 - DNA, 76 bp, Artificial Sequence
  Description of Artificial Sequence: Synthetic whey; 5' sequence + inner sequence + 3'  sequence
tagggaagagaaggacatatgatgcgtcacgatgcatccacatgtactgcgcgttgactagtacatgaccacttga

SEQ ID NO: 47679 - DNA, 76 bp, Artificial Sequence; identical to SEQ ID NO: 35304
  Description of Artificial Sequence: Synthetic whey; 5' sequence + inner sequence + 3'  sequence

SEQ ID NO: 47680 - DNA, 76 bp, Artificial Sequence
  Description of Artificial Sequence: Synthetic whey; 5' sequence + inner sequence + 3'  sequence
tagggaagagaaggacatatgatcgtgacacgacacacatcgatgcatgcgcgttgactagtacatgaccacttga

SEQ ID NO: 47681 - DNA, 76 bp, Artificial Sequence; identical to SEQ ID NO: 3242
  Description of Artificial Sequence: Synthetic whey; 5' sequence + inner sequence + 3'  sequence

SEQ ID NO: 47682 - DNA, 76 bp, Artificial Sequence; identical to SEQ ID NO: 3089
  Description of Artificial Sequence: Synthetic whey; 5' sequence + inner sequence + 3'  sequence

SEQ ID NO: 47683 - DNA, 76 bp, Artificial Sequence; identical to SEQ ID NO: 23815
  Description of Artificial Sequence: Synthetic whey; 5' sequence + inner sequence + 3'  sequence

SEQ ID NO: 47684 - DNA, 76 bp, Artificial Sequence; identical to SEQ ID NO: 23724
  Description of Artificial Sequence: Synthetic whey; 5' sequence + inner sequence + 3'  sequence

SEQ ID NO: 47685 - DNA, 76 bp, Artificial Sequence; identical to SEQ ID NO: 3375
  Description of Artificial Sequence: Synthetic whey; 5' sequence + inner sequence + 3'  sequence

SEQ ID NO: 47686 - DNA, 76 bp, Artificial Sequence; identical to SEQ ID NO: 3687
  Description of Artificial Sequence: Synthetic whey; 5' sequence + inner sequence + 3'  sequence

SEQ ID NO: 47687 - DNA, 76 bp, Artificial Sequence; identical to SEQ ID NO: 23650
  Description of Artificial Sequence: Synthetic whey; 5' sequence + inner sequence + 3'  sequence

SEQ ID NO: 47688 - DNA, 76 bp, Artificial Sequence
  Description of Artificial Sequence: Synthetic whey; 5' sequence + inner sequence + 3'  sequence
tagggaagagaaggacatatgatcgacgcgcagtgacgtacatgcagttcgccttgactagtacatgaccacttga

SEQ ID NO: 47689 - DNA, 76 bp, Artificial Sequence; identical to SEQ ID NO: 3128
  Description of Artificial Sequence: Synthetic whey; 5' sequence + inner sequence + 3'  sequence

SEQ ID NO: 47690 - DNA, 76 bp, Artificial Sequence
  Description of Artificial Sequence: Synthetic whey; 5' sequence + inner sequence + 3'  sequence
tagggaagagaaggacatatgatcgatgcaacgtgacgtgaccattcgccgcgttgactagtacatgaccacttga

SEQ ID NO: 47691 - DNA, 76 bp, Artificial Sequence; identical to SEQ ID NO: 3171
  Description of Artificial Sequence: Synthetic whey; 5' sequence + inner sequence + 3'  sequence

SEQ ID NO: 47692 - DNA, 76 bp, Artificial Sequence; identical to SEQ ID NO: 3133
  Description of Artificial Sequence: Synthetic whey; 5' sequence + inner sequence + 3'  sequence

SEQ ID NO: 47693 - DNA, 76 bp, Artificial Sequence; identical to SEQ ID NO: 23700
  Description of Artificial Sequence: Synthetic whey; 5' sequence + inner sequence + 3'  sequence

SEQ ID NO: 47694 - DNA, 76 bp, Artificial Sequence; identical to SEQ ID NO: 3522
  Description of Artificial Sequence: Synthetic whey; 5' sequence + inner sequence + 3'  sequence

SEQ ID NO: 47695 - DNA, 76 bp, Artificial Sequence; identical to SEQ ID NO: 3991
  Description of Artificial Sequence: Synthetic whey; 5' sequence + inner sequence + 3'  sequence

SEQ ID NO: 47696 - DNA, 76 bp, Artificial Sequence
  Description of Artificial Sequence: Synthetic whey; 5' sequence + inner sequence + 3'  sequence
tagggaagagaaggacatatgatgtcatgctatcccttcgagtgtgacaggtattgactagtacatgaccacttga

SEQ ID NO: 47697 - DNA, 76 bp, Artificial Sequence; identical to SEQ ID NO: 31389
  Description of Artificial Sequence: Synthetic whey; 5' sequence + inner sequence + 3'  sequence

SEQ ID NO: 47698 - DNA, 76 bp, Artificial Sequence
  Description of Artificial Sequence: Synthetic whey; 5' sequence + inner sequence + 3'  sequence
tagggaagagaaggacatatgatggacgcaccgtaccgtatcgtggccatgtgttgactagtacatgaccacttga

SEQ ID NO: 47699 - DNA, 72 bp, Artificial Sequence
  Description of Artificial Sequence: Synthetic whey; 5' sequence + inner sequence + 3'  sequence
tagggaagagaaggacatatgatgtcatgccatcccttcgagtgcgtcattgactagtacatgaccacttga

SEQ ID NO: 47700 - DNA, 76 bp, Artificial Sequence; identical to SEQ ID NO: 27984
  Description of Artificial Sequence: Synthetic whey; 5' sequence + inner sequence + 3'  sequence

SEQ ID NO: 47701 - DNA, 76 bp, Artificial Sequence; identical to SEQ ID NO: 3306
  Description of Artificial Sequence: Synthetic whey; 5' sequence + inner sequence + 3'  sequence

SEQ ID NO: 47702 - DNA, 76 bp, Artificial Sequence
  Description of Artificial Sequence: Synthetic whey; 5' sequence + inner sequence + 3'  sequence
tagggaagagaaggacatatgatccatcccgtcactatcatgtgtgtcacgtattgactagtacatgaccacttga

SEQ ID NO: 47703 - DNA, 76 bp, Artificial Sequence; identical to SEQ ID NO: 3407
  Description of Artificial Sequence: Synthetic whey; 5' sequence + inner sequence + 3'  sequence

SEQ ID NO: 47704 - DNA, 76 bp, Artificial Sequence
  Description of Artificial Sequence: Synthetic whey; 5' sequence + inner sequence + 3'  sequence
tagggaagagaaggacatatgatggaagcaacgtaccgtatcgtggccatgtgttgactagtacatgaccacttga

SEQ ID NO: 47705 - DNA, 76 bp, Artificial Sequence; identical to SEQ ID NO: 3277
  Description of Artificial Sequence: Synthetic whey; 5' sequence + inner sequence + 3'  sequence

SEQ ID NO: 47706 - DNA, 76 bp, Artificial Sequence; identical to SEQ ID NO: 31996
  Description of Artificial Sequence: Synthetic whey; 5' sequence + inner sequence + 3'  sequence

SEQ ID NO: 47707 - DNA, 76 bp, Artificial Sequence; identical to SEQ ID NO: 3663
  Description of Artificial Sequence: Synthetic whey; 5' sequence + inner sequence + 3'  sequence

SEQ ID NO: 47708 - DNA, 76 bp, Artificial Sequence; identical to SEQ ID NO: 3774
  Description of Artificial Sequence: Synthetic whey; 5' sequence + inner sequence + 3'  sequence

SEQ ID NO: 47709 - DNA, 76 bp, Artificial Sequence; identical to SEQ ID NO: 19634
  Description of Artificial Sequence: Synthetic whey; 5' sequence + inner sequence + 3'  sequence

SEQ ID NO: 47710 - DNA, 76 bp, Artificial Sequence; identical to SEQ ID NO: 3527
  Description of Artificial Sequence: Synthetic whey; 5' sequence + inner sequence + 3'  sequence

SEQ ID NO: 47711 - DNA, 76 bp, Artificial Sequence
  Description of Artificial Sequence: Synthetic whey; 5' sequence + inner sequence + 3'  sequence
tagggaagagaaggacatatgatcatgcatgacgacgatgcgccttgttcacgttgactagtacatgaccacttga

SEQ ID NO: 47712 - DNA, 76 bp, Artificial Sequence; identical to SEQ ID NO: 3112
  Description of Artificial Sequence: Synthetic whey; 5' sequence + inner sequence + 3'  sequence

SEQ ID NO: 47713 - DNA, 76 bp, Artificial Sequence; identical to SEQ ID NO: 19342
  Description of Artificial Sequence: Synthetic whey; 5' sequence + inner sequence + 3'  sequence

SEQ ID NO: 47714 - DNA, 76 bp, Artificial Sequence; identical to SEQ ID NO: 3223
  Description of Artificial Sequence: Synthetic whey; 5' sequence + inner sequence + 3'  sequence

SEQ ID NO: 47715 - DNA, 76 bp, Artificial Sequence
  Description of Artificial Sequence: Synthetic whey; 5' sequence + inner sequence + 3'  sequence
tagggaagagaaggacatatgatcgtgcgtgacgatgcgaacgtggctacgcgttgactagtacatgaccacttga

SEQ ID NO: 47716 - DNA, 76 bp, Artificial Sequence; identical to SEQ ID NO: 23545
  Description of Artificial Sequence: Synthetic whey; 5' sequence + inner sequence + 3'  sequence

SEQ ID NO: 47717 - DNA, 76 bp, Artificial Sequence; identical to SEQ ID NO: 23307
  Description of Artificial Sequence: Synthetic whey; 5' sequence + inner sequence + 3'  sequence

SEQ ID NO: 47718 - DNA, 76 bp, Artificial Sequence; identical to SEQ ID NO: 23793
  Description of Artificial Sequence: Synthetic whey; 5' sequence + inner sequence + 3'  sequence

SEQ ID NO: 47719 - DNA, 76 bp, Artificial Sequence; identical to SEQ ID NO: 31668
  Description of Artificial Sequence: Synthetic whey; 5' sequence + inner sequence + 3'  sequence

SEQ ID NO: 47720 - DNA, 76 bp, Artificial Sequence; identical to SEQ ID NO: 31750
  Description of Artificial Sequence: Synthetic whey; 5' sequence + inner sequence + 3'  sequence

SEQ ID NO: 47721 - DNA, 76 bp, Artificial Sequence; identical to SEQ ID NO: 23673
  Description of Artificial Sequence: Synthetic whey; 5' sequence + inner sequence + 3'  sequence

SEQ ID NO: 47722 - DNA, 76 bp, Artificial Sequence
  Description of Artificial Sequence: Synthetic whey; 5' sequence + inner sequence + 3'  sequence
tagggaagagaaggacatatgatcgacaacgaggcacgttacgtcacgtcacgttgactagtacatgaccacttga

SEQ ID NO: 47723 - DNA, 76 bp, Artificial Sequence
  Description of Artificial Sequence: Synthetic whey; 5' sequence + inner sequence + 3'  sequence
tagggaagagaaggacatatgatggccacagcgtacctcaacgtggacgttcattgactagtacatgaccacttga

SEQ ID NO: 47724 - DNA, 76 bp, Artificial Sequence
  Description of Artificial Sequence: Synthetic whey; 5' sequence + inner sequence + 3'  sequence
tagggaagagaaggacatatgatccatcgagtcactatcatgtgtgtcacgtattgactagtacatgaccacttga

SEQ ID NO: 47725 - DNA, 76 bp, Artificial Sequence; identical to SEQ ID NO: 23518
  Description of Artificial Sequence: Synthetic whey; 5' sequence + inner sequence + 3'  sequence

SEQ ID NO: 47726 - DNA, 76 bp, Artificial Sequence
  Description of Artificial Sequence: Synthetic whey; 5' sequence + inner sequence + 3'  sequence
tagggaagagaaggacatatgatcgtggcaacgtacgtacgtcaccttgcgcgttgactagtacatgaccacttga

SEQ ID NO: 47727 - DNA, 76 bp, Artificial Sequence; identical to SEQ ID NO: 23644
  Description of Artificial Sequence: Synthetic whey; 5' sequence + inner sequence + 3'  sequence

SEQ ID NO: 47728 - DNA, 76 bp, Artificial Sequence
  Description of Artificial Sequence: Synthetic whey; 5' sequence + inner sequence + 3'  sequence
tagggaagagaaggacatatgatttcactgtgcctgaccgtcaagttgcggcattgactagtacatgaccacttga

SEQ ID NO: 47729 - DNA, 76 bp, Artificial Sequence; identical to SEQ ID NO: 3561
  Description of Artificial Sequence: Synthetic whey; 5' sequence + inner sequence + 3'  sequence

SEQ ID NO: 47730 - DNA, 76 bp, Artificial Sequence; identical to SEQ ID NO: 31915
  Description of Artificial Sequence: Synthetic whey; 5' sequence + inner sequence + 3'  sequence

SEQ ID NO: 47731 - DNA, 76 bp, Artificial Sequence; identical to SEQ ID NO: 23970
  Description of Artificial Sequence: Synthetic whey; 5' sequence + inner sequence + 3'  sequence

SEQ ID NO: 47732 - DNA, 76 bp, Artificial Sequence
  Description of Artificial Sequence: Synthetic whey; 5' sequence + inner sequence + 3'  sequence
tagggaagagaaggacatatgatgcgaacagcacgtacgtcactgcgcgtgccttgactagtacatgaccacttga

SEQ ID NO: 47733 - DNA, 76 bp, Artificial Sequence
  Description of Artificial Sequence: Synthetic whey; 5' sequence + inner sequence + 3'  sequence
tagggaagagaaggacatatgatgtcactgtgcctgaccggcaagttgcggcattgactagtacatgaccacttga

SEQ ID NO: 47734 - DNA, 76 bp, Artificial Sequence; identical to SEQ ID NO: 19504
  Description of Artificial Sequence: Synthetic whey; 5' sequence + inner sequence + 3'  sequence

SEQ ID NO: 47735 - DNA, 76 bp, Artificial Sequence; identical to SEQ ID NO: 7489
  Description of Artificial Sequence: Synthetic whey; 5' sequence + inner sequence + 3'  sequence

SEQ ID NO: 47736 - DNA, 76 bp, Artificial Sequence
  Description of Artificial Sequence: Synthetic whey; 5' sequence + inner sequence + 3'  sequence
tagggaagagaaggacatatgatgtcatgccatcccttagagtgtgacaggtattgactagtacatgaccacttga

SEQ ID NO: 47737 - DNA, 76 bp, Artificial Sequence
  Description of Artificial Sequence: Synthetic whey; 5' sequence + inner sequence + 3'  sequence
tagggaagagaaggacatatgatgaccacagcgtacctcaacgtggacgtgcattgactagtacatgaccacttga

SEQ ID NO: 47738 - DNA, 76 bp, Artificial Sequence
  Description of Artificial Sequence: Synthetic whey; 5' sequence + inner sequence + 3'  sequence
tagggaagagaaggacatatgatacgcatgcagaccgtaacgtacagtgcgcgttgactagtacatgaccacttga

SEQ ID NO: 47739 - DNA, 76 bp, Artificial Sequence
  Description of Artificial Sequence: Synthetic whey; 5' sequence + inner sequence + 3'  sequence
tagggaagagaaggacatatgatacgtcacgcacagcgtcacgttccgatgcgttgactagtacatgaccacttga

SEQ ID NO: 47740 - DNA, 76 bp, Artificial Sequence
  Description of Artificial Sequence: Synthetic whey; 5' sequence + inner sequence + 3'  sequence
tagggaagagaaggacatatgatcatggcaacgacgcatggtacggcagcacgttgactagtacatgaccacttga

SEQ ID NO: 47741 - DNA, 76 bp, Artificial Sequence
  Description of Artificial Sequence: Synthetic whey; 5' sequence + inner sequence + 3'  sequence
tagggaagagaaggacatatgatggtacgcagtcacgcagcaacgtcgtcacgttgactagtacatgaccacttga

SEQ ID NO: 47742 - DNA, 76 bp, Artificial Sequence
  Description of Artificial Sequence: Synthetic whey; 5' sequence + inner sequence + 3'  sequence
tagggaagagaaggacatatgatcgatacgtatcgcgtcgtccatccgtcacgttgactagtacatgaccacttga

SEQ ID NO: 47743 - DNA, 76 bp, Artificial Sequence; identical to SEQ ID NO: 23475
  Description of Artificial Sequence: Synthetic whey; 5' sequence + inner sequence + 3'  sequence

SEQ ID NO: 47744 - DNA, 76 bp, Artificial Sequence
  Description of Artificial Sequence: Synthetic whey; 5' sequence + inner sequence + 3'  sequence
tagggaagagaaggacatatgatggacgcaacgtaacgtatcgtggccatgtgttgactagtacatgaccacttga

SEQ ID NO: 47745 - DNA, 76 bp, Artificial Sequence
  Description of Artificial Sequence: Synthetic whey; 5' sequence + inner sequence + 3'  sequence
tagggaagagaaggacatatgatgtcactgtgcctgaccgtcaagttccggcattgactagtacatgaccacttga

SEQ ID NO: 47746 - DNA, 76 bp, Artificial Sequence; identical to SEQ ID NO: 23648
  Description of Artificial Sequence: Synthetic whey; 5' sequence + inner sequence + 3'  sequence

SEQ ID NO: 47747 - DNA, 76 bp, Artificial Sequence; identical to SEQ ID NO: 23884
  Description of Artificial Sequence: Synthetic whey; 5' sequence + inner sequence + 3'  sequence

SEQ ID NO: 47748 - DNA, 76 bp, Artificial Sequence; identical to SEQ ID NO: 31771
  Description of Artificial Sequence: Synthetic whey; 5' sequence + inner sequence + 3'  sequence

SEQ ID NO: 47749 - DNA, 76 bp, Artificial Sequence; identical to SEQ ID NO: 23413
  Description of Artificial Sequence: Synthetic whey; 5' sequence + inner sequence + 3'  sequence

SEQ ID NO: 47750 - DNA, 76 bp, Artificial Sequence; identical to SEQ ID NO: 31620
  Description of Artificial Sequence: Synthetic whey; 5' sequence + inner sequence + 3'  sequence

SEQ ID NO: 47751 - DNA, 76 bp, Artificial Sequence
  Description of Artificial Sequence: Synthetic whey; 5' sequence + inner sequence + 3'  sequence
tagggaagagaaggacatatgatcgtgccaacgtaatgccacgtcacctcacgttgactagtacatgaccacttga

SEQ ID NO: 47752 - DNA, 76 bp, Artificial Sequence
  Description of Artificial Sequence: Synthetic whey; 5' sequence + inner sequence + 3'  sequence
tagggaagagaaggacatatgatggacgcagcgtaacgttcgagtggcacgtattgactagtacatgaccacttga

SEQ ID NO: 47753 - DNA, 76 bp, Artificial Sequence
  Description of Artificial Sequence: Synthetic whey; 5' sequence + inner sequence + 3'  sequence
tagggaagagaaggacatatgatcgtgacgtacgcaacacatcgtcctacgcattgactagtacatgaccacttga

SEQ ID NO: 47754 - DNA, 76 bp, Artificial Sequence; identical to SEQ ID NO: 19804
  Description of Artificial Sequence: Synthetic whey; 5' sequence + inner sequence + 3'  sequence

SEQ ID NO: 47755 - DNA, 74 bp, Artificial Sequence; identical to SEQ ID NO: 23321
  Description of Artificial Sequence: Synthetic whey; 5' sequence + inner sequence + 3'  sequence

SEQ ID NO: 47756 - DNA, 76 bp, Artificial Sequence; identical to SEQ ID NO: 23666
  Description of Artificial Sequence: Synthetic whey; 5' sequence + inner sequence + 3'  sequence

SEQ ID NO: 47757 - DNA, 76 bp, Artificial Sequence; identical to SEQ ID NO: 3278
  Description of Artificial Sequence: Synthetic whey; 5' sequence + inner sequence + 3'  sequence

SEQ ID NO: 47758 - DNA, 76 bp, Artificial Sequence
  Description of Artificial Sequence: Synthetic whey; 5' sequence + inner sequence + 3'  sequence
tagggaagagaaggacatatgatacgatcagcacgcactacaacgtacgcacgttgactagtacatgaccacttga

SEQ ID NO: 47759 - DNA, 76 bp, Artificial Sequence; identical to SEQ ID NO: 7230
  Description of Artificial Sequence: Synthetic whey; 5' sequence + inner sequence + 3'  sequence

SEQ ID NO: 47760 - DNA, 76 bp, Artificial Sequence; identical to SEQ ID NO: 3576
  Description of Artificial Sequence: Synthetic whey; 5' sequence + inner sequence + 3'  sequence

SEQ ID NO: 47761 - DNA, 77 bp, Artificial Sequence
  Description of Artificial Sequence: Synthetic whey; 5' sequence + inner sequence + 3'  sequence
tagggaagagaaggacatatgatacgatgcgtaccgatgcgtatgtcgtgcacattgactagtacatgaccacttga

SEQ ID NO: 47762 - DNA, 76 bp, Artificial Sequence; identical to SEQ ID NO: 19988
  Description of Artificial Sequence: Synthetic whey; 5' sequence + inner sequence + 3'  sequence

SEQ ID NO: 47763 - DNA, 76 bp, Artificial Sequence; identical to SEQ ID NO: 3567
  Description of Artificial Sequence: Synthetic whey; 5' sequence + inner sequence + 3'  sequence

SEQ ID NO: 47764 - DNA, 76 bp, Artificial Sequence; identical to SEQ ID NO: 8000
  Description of Artificial Sequence: Synthetic whey; 5' sequence + inner sequence + 3'  sequence

SEQ ID NO: 47765 - DNA, 76 bp, Artificial Sequence
  Description of Artificial Sequence: Synthetic whey; 5' sequence + inner sequence + 3'  sequence
tagggaagagaaggacatatgatcgatggcagaccgtgacgctacgtaacgcgttgactagtacatgaccacttga

SEQ ID NO: 47766 - DNA, 75 bp, Artificial Sequence
  Description of Artificial Sequence: Synthetic whey; 5' sequence + inner sequence + 3'  sequence
tagggaagagaaggacatatgatcgtaccgcaagtgacgtgtccgtgccgtgttgactagtacatgaccacttga

SEQ ID NO: 47767 - DNA, 76 bp, Artificial Sequence
  Description of Artificial Sequence: Synthetic whey; 5' sequence + inner sequence + 3'  sequence
tagggaagagaaggacatatgatgtacgcatcgtcccgtcatgtggttctgtattgactagtacatgaccacttga

SEQ ID NO: 47768 - DNA, 76 bp, Artificial Sequence
  Description of Artificial Sequence: Synthetic whey; 5' sequence + inner sequence + 3'  sequence
tagggaagagaaggacatatgataacgtgcgcgacgtaacgtatgcaccgtgcttgactagtacatgaccacttga

SEQ ID NO: 47769 - DNA, 76 bp, Artificial Sequence; identical to SEQ ID NO: 19457
  Description of Artificial Sequence: Synthetic whey; 5' sequence + inner sequence + 3'  sequence

SEQ ID NO: 47770 - DNA, 76 bp, Artificial Sequence
  Description of Artificial Sequence: Synthetic whey; 5' sequence + inner sequence + 3'  sequence
tagggaagagaaggacatatgatacgtcaacatgtcgcagttcgtaacgcacattgactagtacatgaccacttga

SEQ ID NO: 47771 - DNA, 76 bp, Artificial Sequence
  Description of Artificial Sequence: Synthetic whey; 5' sequence + inner sequence + 3'  sequence
tagggaagagaaggacatatgatggccacagcgtacctcaacgtggacgtacattgactagtacatgaccacttga

SEQ ID NO: 47772 - DNA, 76 bp, Artificial Sequence
  Description of Artificial Sequence: Synthetic whey; 5' sequence + inner sequence + 3'  sequence
tagggaagagaaggacatatgatgtcactgtgcctgaacgtcaagttgcggcattgactagtacatgaccacttga

SEQ ID NO: 47773 - DNA, 76 bp, Artificial Sequence; identical to SEQ ID NO: 31984
  Description of Artificial Sequence: Synthetic whey; 5' sequence + inner sequence + 3'  sequence

SEQ ID NO: 47774 - DNA, 76 bp, Artificial Sequence
  Description of Artificial Sequence: Synthetic whey; 5' sequence + inner sequence + 3'  sequence
tagggaagagaaggacatatgataggcacagcgcagtgtcacgttccgatgcgttgactagtacatgaccacttga

SEQ ID NO: 47775 - DNA, 76 bp, Artificial Sequence; identical to SEQ ID NO: 23690
  Description of Artificial Sequence: Synthetic whey; 5' sequence + inner sequence + 3'  sequence

SEQ ID NO: 47776 - DNA, 76 bp, Artificial Sequence; identical to SEQ ID NO: 3253
  Description of Artificial Sequence: Synthetic whey; 5' sequence + inner sequence + 3'  sequence

SEQ ID NO: 47777 - DNA, 76 bp, Artificial Sequence
  Description of Artificial Sequence: Synthetic whey; 5' sequence + inner sequence + 3'  sequence
tagggaagagaaggacatatgatcgtgacgacggaacgtgcgtatggtacgcattgactagtacatgaccacttga

SEQ ID NO: 47778 - DNA, 76 bp, Artificial Sequence; identical to SEQ ID NO: 3883
  Description of Artificial Sequence: Synthetic whey; 5' sequence + inner sequence + 3'  sequence

SEQ ID NO: 47779 - DNA, 76 bp, Artificial Sequence; identical to SEQ ID NO: 3943
  Description of Artificial Sequence: Synthetic whey; 5' sequence + inner sequence + 3'  sequence

SEQ ID NO: 47780 - DNA, 76 bp, Artificial Sequence
  Description of Artificial Sequence: Synthetic whey; 5' sequence + inner sequence + 3'  sequence
tagggaagagaaggacatatgatcgtgcgcaacgacatgtcactgactgcgcgttgactagtacatgaccacttga

SEQ ID NO: 47781 - DNA, 76 bp, Artificial Sequence
  Description of Artificial Sequence: Synthetic whey; 5' sequence + inner sequence + 3'  sequence
tagggaagagaaggacatatgatggacgcaacgtacagtatcgtggccatgtgttgactagtacatgaccacttga

SEQ ID NO: 47782 - DNA, 76 bp, Artificial Sequence
  Description of Artificial Sequence: Synthetic whey; 5' sequence + inner sequence + 3'  sequence
tagggaagagaaggacatatgatgcgtacggaatggacgtcctgcgctgcacgttgactagtacatgaccacttga

SEQ ID NO: 47783 - DNA, 76 bp, Artificial Sequence; identical to SEQ ID NO: 31864
  Description of Artificial Sequence: Synthetic whey; 5' sequence + inner sequence + 3'  sequence

SEQ ID NO: 47784 - DNA, 76 bp, Artificial Sequence; identical to SEQ ID NO: 11949
  Description of Artificial Sequence: Synthetic whey; 5' sequence + inner sequence + 3'  sequence

SEQ ID NO: 47785 - DNA, 76 bp, Artificial Sequence; identical to SEQ ID NO: 3331
  Description of Artificial Sequence: Synthetic whey; 5' sequence + inner sequence + 3'  sequence

SEQ ID NO: 47786 - DNA, 76 bp, Artificial Sequence; identical to SEQ ID NO: 3529
  Description of Artificial Sequence: Synthetic whey; 5' sequence + inner sequence + 3'  sequence

SEQ ID NO: 47787 - DNA, 76 bp, Artificial Sequence
  Description of Artificial Sequence: Synthetic whey; 5' sequence + inner sequence + 3'  sequence
tagggaagagaaggacatatgatgtcactgtgcctgaccgtcaagctgcggcattgactagtacatgaccacttga

SEQ ID NO: 47788 - DNA, 76 bp, Artificial Sequence; identical to SEQ ID NO: 23820
  Description of Artificial Sequence: Synthetic whey; 5' sequence + inner sequence + 3'  sequence

SEQ ID NO: 47789 - DNA, 76 bp, Artificial Sequence; identical to SEQ ID NO: 11782
  Description of Artificial Sequence: Synthetic whey; 5' sequence + inner sequence + 3'  sequence

SEQ ID NO: 47790 - DNA, 76 bp, Artificial Sequence; identical to SEQ ID NO: 3360
  Description of Artificial Sequence: Synthetic whey; 5' sequence + inner sequence + 3'  sequence

SEQ ID NO: 47791 - DNA, 76 bp, Artificial Sequence; identical to SEQ ID NO: 43519
  Description of Artificial Sequence: Synthetic whey; 5' sequence + inner sequence + 3'  sequence

SEQ ID NO: 47792 - DNA, 76 bp, Artificial Sequence; identical to SEQ ID NO: 11993
  Description of Artificial Sequence: Synthetic whey; 5' sequence + inner sequence + 3'  sequence

SEQ ID NO: 47793 - DNA, 76 bp, Artificial Sequence; identical to SEQ ID NO: 19412
  Description of Artificial Sequence: Synthetic whey; 5' sequence + inner sequence + 3'  sequence

SEQ ID NO: 47794 - DNA, 76 bp, Artificial Sequence
  Description of Artificial Sequence: Synthetic whey; 5' sequence + inner sequence + 3'  sequence
tagggaagagaaggacatatgatgcgagacaacgcgaaccgttacgatgcacgttgactagtacatgaccacttga

SEQ ID NO: 47795 - DNA, 76 bp, Artificial Sequence; identical to SEQ ID NO: 11618
  Description of Artificial Sequence: Synthetic whey; 5' sequence + inner sequence + 3'  sequence

SEQ ID NO: 47796 - DNA, 76 bp, Artificial Sequence
  Description of Artificial Sequence: Synthetic whey; 5' sequence + inner sequence + 3'  sequence
tagggaagagaaggacatatgatacgtcacacgcgttgcatcgatgcgttgcgttgactagtacatgaccacttga

SEQ ID NO: 47797 - DNA, 76 bp, Artificial Sequence
  Description of Artificial Sequence: Synthetic whey; 5' sequence + inner sequence + 3'  sequence
tagggaagagaaggacatatgatacgcaacgcaatgtacgcacatgatgcacgttgactagtacatgaccacttga

SEQ ID NO: 47798 - DNA, 76 bp, Artificial Sequence
  Description of Artificial Sequence: Synthetic whey; 5' sequence + inner sequence + 3'  sequence
tagggaagagaaggacatatgatcgtgtgcagcacaaggacgtacgcactgccttgactagtacatgaccacttga

SEQ ID NO: 47799 - DNA, 76 bp, Artificial Sequence; identical to SEQ ID NO: 3531
  Description of Artificial Sequence: Synthetic whey; 5' sequence + inner sequence + 3'  sequence

SEQ ID NO: 47800 - DNA, 76 bp, Artificial Sequence; identical to SEQ ID NO: 23661
  Description of Artificial Sequence: Synthetic whey; 5' sequence + inner sequence + 3'  sequence

SEQ ID NO: 47801 - DNA, 76 bp, Artificial Sequence; identical to SEQ ID NO: 31964
  Description of Artificial Sequence: Synthetic whey; 5' sequence + inner sequence + 3'  sequence

SEQ ID NO: 47802 - DNA, 76 bp, Artificial Sequence; identical to SEQ ID NO: 3563
  Description of Artificial Sequence: Synthetic whey; 5' sequence + inner sequence + 3'  sequence

SEQ ID NO: 47803 - DNA, 76 bp, Artificial Sequence
  Description of Artificial Sequence: Synthetic whey; 5' sequence + inner sequence + 3'  sequence
tagggaagagaaggacatatgatgtcactgtccctgaccgtcaagttgcggcattgactagtacatgaccacttga

SEQ ID NO: 47804 - DNA, 76 bp, Artificial Sequence
  Description of Artificial Sequence: Synthetic whey; 5' sequence + inner sequence + 3'  sequence
tagggaagagaaggacatatgatcacgtacggatgcaacgtagcatgtgcgtattgactagtacatgaccacttga

SEQ ID NO: 47805 - DNA, 76 bp, Artificial Sequence
  Description of Artificial Sequence: Synthetic whey; 5' sequence + inner sequence + 3'  sequence
tagggaagagaaggacatatgatacgatgcgacgtgccattgcgtacgatgcgttgactagtacatgaccacttga

SEQ ID NO: 47806 - DNA, 76 bp, Artificial Sequence; identical to SEQ ID NO: 3628
  Description of Artificial Sequence: Synthetic whey; 5' sequence + inner sequence + 3'  sequence

SEQ ID NO: 47807 - DNA, 76 bp, Artificial Sequence; identical to SEQ ID NO: 3428
  Description of Artificial Sequence: Synthetic whey; 5' sequence + inner sequence + 3'  sequence

SEQ ID NO: 47808 - DNA, 76 bp, Artificial Sequence; identical to SEQ ID NO: 31425
  Description of Artificial Sequence: Synthetic whey; 5' sequence + inner sequence + 3'  sequence

SEQ ID NO: 47809 - DNA, 76 bp, Artificial Sequence; identical to SEQ ID NO: 3055
  Description of Artificial Sequence: Synthetic whey; 5' sequence + inner sequence + 3'  sequence

SEQ ID NO: 47810 - DNA, 76 bp, Artificial Sequence; identical to SEQ ID NO: 35379
  Description of Artificial Sequence: Synthetic whey; 5' sequence + inner sequence + 3'  sequence

SEQ ID NO: 47811 - DNA, 76 bp, Artificial Sequence; identical to SEQ ID NO: 3275
  Description of Artificial Sequence: Synthetic whey; 5' sequence + inner sequence + 3'  sequence

SEQ ID NO: 47812 - DNA, 76 bp, Artificial Sequence; identical to SEQ ID NO: 15700
  Description of Artificial Sequence: Synthetic whey; 5' sequence + inner sequence + 3'  sequence

SEQ ID NO: 47813 - DNA, 76 bp, Artificial Sequence; identical to SEQ ID NO: 15945
  Description of Artificial Sequence: Synthetic whey; 5' sequence + inner sequence + 3'  sequence

SEQ ID NO: 47814 - DNA, 76 bp, Artificial Sequence; identical to SEQ ID NO: 23576
  Description of Artificial Sequence: Synthetic whey; 5' sequence + inner sequence + 3'  sequence

SEQ ID NO: 47815 - DNA, 76 bp, Artificial Sequence; identical to SEQ ID NO: 23701
  Description of Artificial Sequence: Synthetic whey; 5' sequence + inner sequence + 3'  sequence

SEQ ID NO: 47816 - DNA, 76 bp, Artificial Sequence
  Description of Artificial Sequence: Synthetic whey; 5' sequence + inner sequence + 3'  sequence
tagggaagagaaggacatatgatcacgcaacgtacgatcgtagtgtcgttggcttgactagtacatgaccacttga

SEQ ID NO: 47817 - DNA, 76 bp, Artificial Sequence
  Description of Artificial Sequence: Synthetic whey; 5' sequence + inner sequence + 3'  sequence
tagggaagagaaggacatatgatcgtaccgcaagtgacgtgtccgtgccgtgtttgactagtacatgaccacttga

SEQ ID NO: 47818 - DNA, 76 bp, Artificial Sequence; identical to SEQ ID NO: 3168
  Description of Artificial Sequence: Synthetic whey; 5' sequence + inner sequence + 3'  sequence

SEQ ID NO: 47819 - DNA, 76 bp, Artificial Sequence
  Description of Artificial Sequence: Synthetic whey; 5' sequence + inner sequence + 3'  sequence
tagggaagagaaggacatatgatcacgtcagacacatcgtccgttacgtcacgttgactagtacatgaccacttga

SEQ ID NO: 47820 - DNA, 76 bp, Artificial Sequence
  Description of Artificial Sequence: Synthetic whey; 5' sequence + inner sequence + 3'  sequence
tagggaagagaaggacatatgatgcactactcgcaccctatcatgtaggcatgttgactagtacatgaccacttga

SEQ ID NO: 47821 - DNA, 76 bp, Artificial Sequence
  Description of Artificial Sequence: Synthetic whey; 5' sequence + inner sequence + 3'  sequence
tagggaagagaaggacatatgatccatcgcgtccctatcatgtgtgtcacgtattgactagtacatgaccacttga

SEQ ID NO: 47822 - DNA, 76 bp, Artificial Sequence; identical to SEQ ID NO: 16002
  Description of Artificial Sequence: Synthetic whey; 5' sequence + inner sequence + 3'  sequence

SEQ ID NO: 47823 - DNA, 76 bp, Artificial Sequence; identical to SEQ ID NO: 23353
  Description of Artificial Sequence: Synthetic whey; 5' sequence + inner sequence + 3'  sequence

SEQ ID NO: 47824 - DNA, 76 bp, Artificial Sequence; identical to SEQ ID NO: 31659
  Description of Artificial Sequence: Synthetic whey; 5' sequence + inner sequence + 3'  sequence

SEQ ID NO: 47825 - DNA, 76 bp, Artificial Sequence
  Description of Artificial Sequence: Synthetic whey; 5' sequence + inner sequence + 3'  sequence
tagggaagagaaggacatatgatgtcactgtgcttgaccgtcaagttgcggcattgactagtacatgaccacttga

SEQ ID NO: 47826 - DNA, 76 bp, Artificial Sequence; identical to SEQ ID NO: 3257
  Description of Artificial Sequence: Synthetic whey; 5' sequence + inner sequence + 3'  sequence

SEQ ID NO: 47827 - DNA, 76 bp, Artificial Sequence; identical to SEQ ID NO: 3809
  Description of Artificial Sequence: Synthetic whey; 5' sequence + inner sequence + 3'  sequence

SEQ ID NO: 47828 - DNA, 76 bp, Artificial Sequence; identical to SEQ ID NO: 3583
  Description of Artificial Sequence: Synthetic whey; 5' sequence + inner sequence + 3'  sequence

SEQ ID NO: 47829 - DNA, 76 bp, Artificial Sequence; identical to SEQ ID NO: 31114
  Description of Artificial Sequence: Synthetic whey; 5' sequence + inner sequence + 3'  sequence

SEQ ID NO: 47830 - DNA, 76 bp, Artificial Sequence
  Description of Artificial Sequence: Synthetic whey; 5' sequence + inner sequence + 3'  sequence
tagggaagagaaggacatatgatgtcatgccaccccttcgagtgtgacaggtattgactagtacatgaccacttga

SEQ ID NO: 47831 - DNA, 76 bp, Artificial Sequence; identical to SEQ ID NO: 23692
  Description of Artificial Sequence: Synthetic whey; 5' sequence + inner sequence + 3'  sequence

SEQ ID NO: 47832 - DNA, 76 bp, Artificial Sequence; identical to SEQ ID NO: 3311
  Description of Artificial Sequence: Synthetic whey; 5' sequence + inner sequence + 3'  sequence

SEQ ID NO: 47833 - DNA, 76 bp, Artificial Sequence
  Description of Artificial Sequence: Synthetic whey; 5' sequence + inner sequence + 3'  sequence
tagggaagagaaggacatatgatcgtgacagcatcgtacgtacggaccgcgcgttgactagtacatgaccacttga

SEQ ID NO: 47834 - DNA, 76 bp, Artificial Sequence
  Description of Artificial Sequence: Synthetic whey; 5' sequence + inner sequence + 3'  sequence
tagggaagagaaggacatatgatggacgcaacgaaccgtatcgtggccatgtattgactagtacatgaccacttga

SEQ ID NO: 47835 - DNA, 76 bp, Artificial Sequence
  Description of Artificial Sequence: Synthetic whey; 5' sequence + inner sequence + 3'  sequence
tagggaagagaaggacatatgatgcacgactcgcaccctatcatgagggcatgttgactagtacatgaccacttga

SEQ ID NO: 47836 - DNA, 76 bp, Artificial Sequence; identical to SEQ ID NO: 39827
  Description of Artificial Sequence: Synthetic whey; 5' sequence + inner sequence + 3'  sequence

SEQ ID NO: 47837 - DNA, 76 bp, Artificial Sequence
  Description of Artificial Sequence: Synthetic whey; 5' sequence + inner sequence + 3'  sequence
tagggaagagaaggacatatgatgtcactgtgcctgaccgtcaagttgcggcgttgactagtacatgaccacttga

SEQ ID NO: 47838 - DNA, 76 bp, Artificial Sequence
  Description of Artificial Sequence: Synthetic whey; 5' sequence + inner sequence + 3'  sequence
tagggaagagaaggacatatgatggacgcaacgtaccgtatcgtggacatgtgttgactagtacatgaccacttga

SEQ ID NO: 47839 - DNA, 76 bp, Artificial Sequence
  Description of Artificial Sequence: Synthetic whey; 5' sequence + inner sequence + 3'  sequence
tagggaagagaaggacatatgatgtcatgccatcccttcgagtgtgataggtattgactagtacatgaccacttga

SEQ ID NO: 47840 - DNA, 76 bp, Artificial Sequence; identical to SEQ ID NO: 23797
  Description of Artificial Sequence: Synthetic whey; 5' sequence + inner sequence + 3'  sequence

SEQ ID NO: 47841 - DNA, 76 bp, Artificial Sequence
  Description of Artificial Sequence: Synthetic whey; 5' sequence + inner sequence + 3'  sequence
tagggaagagaaggacatatgatggacgcaacgtaccgtatcgtggccacgtgttgactagtacatgaccacttga

SEQ ID NO: 47842 - DNA, 76 bp, Artificial Sequence; identical to SEQ ID NO: 19612
  Description of Artificial Sequence: Synthetic whey; 5' sequence + inner sequence + 3'  sequence

SEQ ID NO: 47843 - DNA, 76 bp, Artificial Sequence
  Description of Artificial Sequence: Synthetic whey; 5' sequence + inner sequence + 3'  sequence
tagggaagagaaggacatatgatcgtgacgcgatggtgacgtaccttgccgtattgactagtacatgaccacttga

SEQ ID NO: 47844 - DNA, 76 bp, Artificial Sequence; identical to SEQ ID NO: 31737
  Description of Artificial Sequence: Synthetic whey; 5' sequence + inner sequence + 3'  sequence

SEQ ID NO: 47845 - DNA, 76 bp, Artificial Sequence
  Description of Artificial Sequence: Synthetic whey; 5' sequence + inner sequence + 3'  sequence
tagggaagagaaggacatatgatgcgcgaacgacctgcatgtacgttgacgcgttgactagtacatgaccacttga

SEQ ID NO: 47846 - DNA, 76 bp, Artificial Sequence
  Description of Artificial Sequence: Synthetic whey; 5' sequence + inner sequence + 3'  sequence
tagggaagagaaggacatatgatcacgacgtacgtgacgctatgcactgcgtgttgactagtacatgaccacttga

SEQ ID NO: 47847 - DNA, 76 bp, Artificial Sequence; identical to SEQ ID NO: 23415
  Description of Artificial Sequence: Synthetic whey; 5' sequence + inner sequence + 3'  sequence

SEQ ID NO: 47848 - DNA, 76 bp, Artificial Sequence; identical to SEQ ID NO: 23952
  Description of Artificial Sequence: Synthetic whey; 5' sequence + inner sequence + 3'  sequence

SEQ ID NO: 47849 - DNA, 76 bp, Artificial Sequence
  Description of Artificial Sequence: Synthetic whey; 5' sequence + inner sequence + 3'  sequence
tagggaagagaaggacatatgatcgtgcgagacgatgttggcgtgacgtcgcgttgactagtacatgaccacttga

SEQ ID NO: 47850 - DNA, 76 bp, Artificial Sequence; identical to SEQ ID NO: 3269
  Description of Artificial Sequence: Synthetic whey; 5' sequence + inner sequence + 3'  sequence

SEQ ID NO: 47851 - DNA, 76 bp, Artificial Sequence; identical to SEQ ID NO: 11401
  Description of Artificial Sequence: Synthetic whey; 5' sequence + inner sequence + 3'  sequence

SEQ ID NO: 47852 - DNA, 76 bp, Artificial Sequence; identical to SEQ ID NO: 3507
  Description of Artificial Sequence: Synthetic whey; 5' sequence + inner sequence + 3'  sequence

SEQ ID NO: 47853 - DNA, 76 bp, Artificial Sequence
  Description of Artificial Sequence: Synthetic whey; 5' sequence + inner sequence + 3'  sequence
tagggaagagaaggacatatgatgttacgcagtgacgcatcacgtacgccaccttgactagtacatgaccacttga

SEQ ID NO: 47854 - DNA, 76 bp, Artificial Sequence; identical to SEQ ID NO: 3039
  Description of Artificial Sequence: Synthetic whey; 5' sequence + inner sequence + 3'  sequence

SEQ ID NO: 47855 - DNA, 76 bp, Artificial Sequence
  Description of Artificial Sequence: Synthetic whey; 5' sequence + inner sequence + 3'  sequence
tagggaagagaaggacatatgatcgtgcacagtcacgttggcacatcgtcacattgactagtacatgaccacttga

SEQ ID NO: 47856 - DNA, 76 bp, Artificial Sequence
  Description of Artificial Sequence: Synthetic whey; 5' sequence + inner sequence + 3'  sequence
tagggaagagaaggacatatgatgtcactgtacctgaccgtcaagttgcggcattgactagtacatgaccacttga

SEQ ID NO: 47857 - DNA, 76 bp, Artificial Sequence; identical to SEQ ID NO: 19703
  Description of Artificial Sequence: Synthetic whey; 5' sequence + inner sequence + 3'  sequence

SEQ ID NO: 47858 - DNA, 76 bp, Artificial Sequence; identical to SEQ ID NO: 23913
  Description of Artificial Sequence: Synthetic whey; 5' sequence + inner sequence + 3'  sequence

SEQ ID NO: 47859 - DNA, 76 bp, Artificial Sequence
  Description of Artificial Sequence: Synthetic whey; 5' sequence + inner sequence + 3'  sequence
tagggaagagaaggacatatgatacgtgacgcagcgtagtatcgtactgcacattgactagtacatgaccacttga

SEQ ID NO: 47860 - DNA, 76 bp, Artificial Sequence; identical to SEQ ID NO: 3234
  Description of Artificial Sequence: Synthetic whey; 5' sequence + inner sequence + 3'  sequence

SEQ ID NO: 47861 - DNA, 76 bp, Artificial Sequence; identical to SEQ ID NO: 31603
  Description of Artificial Sequence: Synthetic whey; 5' sequence + inner sequence + 3'  sequence

SEQ ID NO: 47862 - DNA, 76 bp, Artificial Sequence; identical to SEQ ID NO: 19949
  Description of Artificial Sequence: Synthetic whey; 5' sequence + inner sequence + 3'  sequence

SEQ ID NO: 47863 - DNA, 76 bp, Artificial Sequence; identical to SEQ ID NO: 3909
  Description of Artificial Sequence: Synthetic whey; 5' sequence + inner sequence + 3'  sequence

SEQ ID NO: 47864 - DNA, 76 bp, Artificial Sequence
  Description of Artificial Sequence: Synthetic whey; 5' sequence + inner sequence + 3'  sequence
tagggaagagaaggacatatgatcgtacggcaccacgcatacgtcacttcggcttgactagtacatgaccacttga

SEQ ID NO: 47865 - DNA, 76 bp, Artificial Sequence
  Description of Artificial Sequence: Synthetic whey; 5' sequence + inner sequence + 3'  sequence
tagggaagagaaggacatatgatcgttacgcaacacaaacgtacgcatgcacgttgactagtacatgaccacttga

SEQ ID NO: 47866 - DNA, 76 bp, Artificial Sequence; identical to SEQ ID NO: 3756
  Description of Artificial Sequence: Synthetic whey; 5' sequence + inner sequence + 3'  sequence

SEQ ID NO: 47867 - DNA, 76 bp, Artificial Sequence; identical to SEQ ID NO: 19966
  Description of Artificial Sequence: Synthetic whey; 5' sequence + inner sequence + 3'  sequence

SEQ ID NO: 47868 - DNA, 76 bp, Artificial Sequence; identical to SEQ ID NO: 3120
  Description of Artificial Sequence: Synthetic whey; 5' sequence + inner sequence + 3'  sequence

SEQ ID NO: 47869 - DNA, 76 bp, Artificial Sequence; identical to SEQ ID NO: 3292
  Description of Artificial Sequence: Synthetic whey; 5' sequence + inner sequence + 3'  sequence

SEQ ID NO: 47870 - DNA, 76 bp, Artificial Sequence; identical to SEQ ID NO: 19979
  Description of Artificial Sequence: Synthetic whey; 5' sequence + inner sequence + 3'  sequence

SEQ ID NO: 47871 - DNA, 76 bp, Artificial Sequence; identical to SEQ ID NO: 23669
  Description of Artificial Sequence: Synthetic whey; 5' sequence + inner sequence + 3'  sequence

SEQ ID NO: 47872 - DNA, 76 bp, Artificial Sequence; identical to SEQ ID NO: 19655
  Description of Artificial Sequence: Synthetic whey; 5' sequence + inner sequence + 3'  sequence

SEQ ID NO: 47873 - DNA, 76 bp, Artificial Sequence
  Description of Artificial Sequence: Synthetic whey; 5' sequence + inner sequence + 3'  sequence
tagggaagagaaggacatatgatcgtacggtacggcgatggaggtacgtcgcgttgactagtacatgaccacttga

SEQ ID NO: 47874 - DNA, 76 bp, Artificial Sequence
  Description of Artificial Sequence: Synthetic whey; 5' sequence + inner sequence + 3'  sequence
tagggaagagaaggacatatgatggccacagcgtacctcaacgtggacgtggattgactagtacatgaccacttga

SEQ ID NO: 47875 - DNA, 76 bp, Artificial Sequence; identical to SEQ ID NO: 23598
  Description of Artificial Sequence: Synthetic whey; 5' sequence + inner sequence + 3'  sequence

SEQ ID NO: 47876 - DNA, 76 bp, Artificial Sequence; identical to SEQ ID NO: 31412
  Description of Artificial Sequence: Synthetic whey; 5' sequence + inner sequence + 3'  sequence

SEQ ID NO: 47877 - DNA, 76 bp, Artificial Sequence; identical to SEQ ID NO: 23668
  Description of Artificial Sequence: Synthetic whey; 5' sequence + inner sequence + 3'  sequence

SEQ ID NO: 47878 - DNA, 76 bp, Artificial Sequence
  Description of Artificial Sequence: Synthetic whey; 5' sequence + inner sequence + 3'  sequence
tagggaagagaaggacatatgatggacgcagcgtaccgtatcgtggccatgtgttgactagtacatgaccacttga

SEQ ID NO: 47879 - DNA, 76 bp, Artificial Sequence
  Description of Artificial Sequence: Synthetic whey; 5' sequence + inner sequence + 3'  sequence
tagggaagagaaggacatatgatcgtgtgcgcaacgtgacacggtccttcgcattgactagtacatgaccacttga

SEQ ID NO: 47880 - DNA, 76 bp, Artificial Sequence
  Description of Artificial Sequence: Synthetic whey; 5' sequence + inner sequence + 3'  sequence
tagggaagagaaggacatatgatccatcgcgtcactataatgtgtgtcacgtattgactagtacatgaccacttga

SEQ ID NO: 47881 - DNA, 76 bp, Artificial Sequence
  Description of Artificial Sequence: Synthetic whey; 5' sequence + inner sequence + 3'  sequence
tagggaagagaaggacatatgatcgtgtacgacgcgacaacgtgcctgccgtgttgactagtacatgaccacttga

SEQ ID NO: 47882 - DNA, 76 bp, Artificial Sequence; identical to SEQ ID NO: 3085
  Description of Artificial Sequence: Synthetic whey; 5' sequence + inner sequence + 3'  sequence

SEQ ID NO: 47883 - DNA, 76 bp, Artificial Sequence
  Description of Artificial Sequence: Synthetic whey; 5' sequence + inner sequence + 3'  sequence
tagggaagagaaggacatatgatacgtcacacgcacaggtacgttgtggtacgttgactagtacatgaccacttga

SEQ ID NO: 47884 - DNA, 76 bp, Artificial Sequence
  Description of Artificial Sequence: Synthetic whey; 5' sequence + inner sequence + 3'  sequence
tagggaagagaaggacatatgatacgtcacaacgcagcgtccgttcgtacggtttgactagtacatgaccacttga

SEQ ID NO: 47885 - DNA, 76 bp, Artificial Sequence
  Description of Artificial Sequence: Synthetic whey; 5' sequence + inner sequence + 3'  sequence
tagggaagagaaggacatatgatgtcactctgcctgaccgtcaagttgcggcattgactagtacatgaccacttga

SEQ ID NO: 47886 - DNA, 76 bp, Artificial Sequence
  Description of Artificial Sequence: Synthetic whey; 5' sequence + inner sequence + 3'  sequence
tagggaagagaaggacatatgattgtgcacacaccgtatgtcctcacgtcacgttgactagtacatgaccacttga

SEQ ID NO: 47887 - DNA, 76 bp, Artificial Sequence; identical to SEQ ID NO: 31557
  Description of Artificial Sequence: Synthetic whey; 5' sequence + inner sequence + 3'  sequence

SEQ ID NO: 47888 - DNA, 76 bp, Artificial Sequence
  Description of Artificial Sequence: Synthetic whey; 5' sequence + inner sequence + 3'  sequence
tagggaagagaaggacatatgatcgtgcgacagtacgacgagatgtgcgtgtcttgactagtacatgaccacttga

SEQ ID NO: 47889 - DNA, 76 bp, Artificial Sequence
  Description of Artificial Sequence: Synthetic whey; 5' sequence + inner sequence + 3'  sequence
tagggaagagaaggacatatgatgcgatgtcgcaacgatgtacggtctgcacgttgactagtacatgaccacttga

SEQ ID NO: 47890 - DNA, 76 bp, Artificial Sequence
  Description of Artificial Sequence: Synthetic whey; 5' sequence + inner sequence + 3'  sequence
tagggaagagaaggacatatgatacgtcacaacgcgtgtcgtccgttcgcgccttgactagtacatgaccacttga

SEQ ID NO: 47891 - DNA, 76 bp, Artificial Sequence
  Description of Artificial Sequence: Synthetic whey; 5' sequence + inner sequence + 3'  sequence
tagggaagagaaggacatatgatcgatcacgatgcgaacacatggcctgcagcttgactagtacatgaccacttga

SEQ ID NO: 47892 - DNA, 76 bp, Artificial Sequence; identical to SEQ ID NO: 31595
  Description of Artificial Sequence: Synthetic whey; 5' sequence + inner sequence + 3'  sequence

SEQ ID NO: 47893 - DNA, 76 bp, Artificial Sequence; identical to SEQ ID NO: 3317
  Description of Artificial Sequence: Synthetic whey; 5' sequence + inner sequence + 3'  sequence

SEQ ID NO: 47894 - DNA, 76 bp, Artificial Sequence
  Description of Artificial Sequence: Synthetic whey; 5' sequence + inner sequence + 3'  sequence
tagggaagagaaggacatatgatggacgcaacgtaccgaatcgtggccatgtgttgactagtacatgaccacttga

SEQ ID NO: 47895 - DNA, 76 bp, Artificial Sequence
  Description of Artificial Sequence: Synthetic whey; 5' sequence + inner sequence + 3'  sequence
tagggaagagaaggacatatgatgtcactgtgcccgaccgtcaagttgcggcattgactagtacatgaccacttga

SEQ ID NO: 47896 - DNA, 76 bp, Artificial Sequence; identical to SEQ ID NO: 35136
  Description of Artificial Sequence: Synthetic whey; 5' sequence + inner sequence + 3'  sequence

SEQ ID NO: 47897 - DNA, 76 bp, Artificial Sequence; identical to SEQ ID NO: 3179
  Description of Artificial Sequence: Synthetic whey; 5' sequence + inner sequence + 3'  sequence

SEQ ID NO: 47898 - DNA, 76 bp, Artificial Sequence
  Description of Artificial Sequence: Synthetic whey; 5' sequence + inner sequence + 3'  sequence
tagggaagagaaggacatatgatgcgttggcgacgagtgcgtgacgttacgcgttgactagtacatgaccacttga

SEQ ID NO: 47899 - DNA, 76 bp, Artificial Sequence; identical to SEQ ID NO: 23736
  Description of Artificial Sequence: Synthetic whey; 5' sequence + inner sequence + 3'  sequence

SEQ ID NO: 47900 - DNA, 76 bp, Artificial Sequence
  Description of Artificial Sequence: Synthetic whey; 5' sequence + inner sequence + 3'  sequence
tagggaagagaaggacatatgatgcgtggcgtaacgcagcgtgtggcatcgcgttgactagtacatgaccacttga

SEQ ID NO: 47901 - DNA, 76 bp, Artificial Sequence
  Description of Artificial Sequence: Synthetic whey; 5' sequence + inner sequence + 3'  sequence
tagggaagagaaggacatatgattgtgcgaaacggaccgcatgttacgtcacattgactagtacatgaccacttga

SEQ ID NO: 47902 - DNA, 76 bp, Artificial Sequence
  Description of Artificial Sequence: Synthetic whey; 5' sequence + inner sequence + 3'  sequence
tagggaagagaaggacatatgatcgtgatgcgtcacgtcacattcggcctgtcttgactagtacatgaccacttga

SEQ ID NO: 47903 - DNA, 76 bp, Artificial Sequence
  Description of Artificial Sequence: Synthetic whey; 5' sequence + inner sequence + 3'  sequence
tagggaagagaaggacatatgatggacgcaacttaccgtatcgtggccatgtgttgactagtacatgaccacttga

SEQ ID NO: 47904 - DNA, 76 bp, Artificial Sequence; identical to SEQ ID NO: 23553
  Description of Artificial Sequence: Synthetic whey; 5' sequence + inner sequence + 3'  sequence

SEQ ID NO: 47905 - DNA, 76 bp, Artificial Sequence
  Description of Artificial Sequence: Synthetic whey; 5' sequence + inner sequence + 3'  sequence
tagggaagagaaggacatatgatgtcactgtgcctgaccgtcaagttgccgcattgactagtacatgaccacttga

SEQ ID NO: 47906 - DNA, 76 bp, Artificial Sequence; identical to SEQ ID NO: 3603
  Description of Artificial Sequence: Synthetic whey; 5' sequence + inner sequence + 3'  sequence

SEQ ID NO: 47907 - DNA, 76 bp, Artificial Sequence
  Description of Artificial Sequence: Synthetic whey; 5' sequence + inner sequence + 3'  sequence
tagggaagagaaggacatatgatgcacgaatcgcaccctatcatgtaggcatgttgactagtacatgaccacttga

SEQ ID NO: 47908 - DNA, 76 bp, Artificial Sequence
  Description of Artificial Sequence: Synthetic whey; 5' sequence + inner sequence + 3'  sequence
tagggaagagaaggacatatgatacgcaacgacgctacgatacgtgctgtacgttgactagtacatgaccacttga

SEQ ID NO: 47909 - DNA, 76 bp, Artificial Sequence; identical to SEQ ID NO: 3497
  Description of Artificial Sequence: Synthetic whey; 5' sequence + inner sequence + 3'  sequence

SEQ ID NO: 47910 - DNA, 76 bp, Artificial Sequence
  Description of Artificial Sequence: Synthetic whey; 5' sequence + inner sequence + 3'  sequence
tagggaagagaaggacatatgatcgtcacgccgaggcacgtccttccgccacgttgactagtacatgaccacttga

SEQ ID NO: 47911 - DNA, 76 bp, Artificial Sequence; identical to SEQ ID NO: 3905
  Description of Artificial Sequence: Synthetic whey; 5' sequence + inner sequence + 3'  sequence

SEQ ID NO: 47912 - DNA, 76 bp, Artificial Sequence; identical to SEQ ID NO: 3956
  Description of Artificial Sequence: Synthetic whey; 5' sequence + inner sequence + 3'  sequence

SEQ ID NO: 47913 - DNA, 76 bp, Artificial Sequence; identical to SEQ ID NO: 31555
  Description of Artificial Sequence: Synthetic whey; 5' sequence + inner sequence + 3'  sequence

SEQ ID NO: 47914 - DNA, 76 bp, Artificial Sequence; identical to SEQ ID NO: 7807
  Description of Artificial Sequence: Synthetic whey; 5' sequence + inner sequence + 3'  sequence

SEQ ID NO: 47915 - DNA, 76 bp, Artificial Sequence; identical to SEQ ID NO: 23343
  Description of Artificial Sequence: Synthetic whey; 5' sequence + inner sequence + 3'  sequence

SEQ ID NO: 47916 - DNA, 76 bp, Artificial Sequence
  Description of Artificial Sequence: Synthetic whey; 5' sequence + inner sequence + 3'  sequence
tagggaagagaaggacatatgatgtcactgtgcctgaccgtcaagttgcggccttgactagtacatgaccacttga

SEQ ID NO: 47917 - DNA, 76 bp, Artificial Sequence
  Description of Artificial Sequence: Synthetic whey; 5' sequence + inner sequence + 3'  sequence
tagggaagagaaggacatatgatggacgcaacgtaccgtatcgttgccatgtgttgactagtacatgaccacttga

SEQ ID NO: 47918 - DNA, 76 bp, Artificial Sequence
  Description of Artificial Sequence: Synthetic whey; 5' sequence + inner sequence + 3'  sequence
tagggaagagaaggacatatgatgtcactgggcctgaccgtcaagttgcggcattgactagtacatgaccacttga

SEQ ID NO: 47919 - DNA, 76 bp, Artificial Sequence; identical to SEQ ID NO: 31910
  Description of Artificial Sequence: Synthetic whey; 5' sequence + inner sequence + 3'  sequence

SEQ ID NO: 47920 - DNA, 76 bp, Artificial Sequence
  Description of Artificial Sequence: Synthetic whey; 5' sequence + inner sequence + 3'  sequence
tagggaagagaaggacatatgatttacgcatcgtcccgtcatgtggttccgtattgactagtacatgaccacttga

SEQ ID NO: 47921 - DNA, 76 bp, Artificial Sequence; identical to SEQ ID NO: 23367
  Description of Artificial Sequence: Synthetic whey; 5' sequence + inner sequence + 3'  sequence

SEQ ID NO: 47922 - DNA, 76 bp, Artificial Sequence
  Description of Artificial Sequence: Synthetic whey; 5' sequence + inner sequence + 3'  sequence
tagggaagagaaggacatatgatgtcatgccatccctccgagtgtgacaggtattgactagtacatgaccacttga

SEQ ID NO: 47923 - DNA, 76 bp, Artificial Sequence
  Description of Artificial Sequence: Synthetic whey; 5' sequence + inner sequence + 3'  sequence
tagggaagagaaggacatatgatcgtacgcaacgtgcacgactgtcctgtgccttgactagtacatgaccacttga

SEQ ID NO: 47924 - DNA, 76 bp, Artificial Sequence
  Description of Artificial Sequence: Synthetic whey; 5' sequence + inner sequence + 3'  sequence
tagggaagagaaggacatatgatgcacgactcgcaccctctcatgtaggcatgttgactagtacatgaccacttga

SEQ ID NO: 47925 - DNA, 76 bp, Artificial Sequence; identical to SEQ ID NO: 23388
  Description of Artificial Sequence: Synthetic whey; 5' sequence + inner sequence + 3'  sequence

SEQ ID NO: 47926 - DNA, 76 bp, Artificial Sequence
  Description of Artificial Sequence: Synthetic whey; 5' sequence + inner sequence + 3'  sequence
tagggaagagaaggacatatgatgcactgcacgcaccctctcatgtaggcatgttgactagtacatgaccacttga

SEQ ID NO: 47927 - DNA, 76 bp, Artificial Sequence; identical to SEQ ID NO: 15827
  Description of Artificial Sequence: Synthetic whey; 5' sequence + inner sequence + 3'  sequence

SEQ ID NO: 47928 - DNA, 76 bp, Artificial Sequence; identical to SEQ ID NO: 19878
  Description of Artificial Sequence: Synthetic whey; 5' sequence + inner sequence + 3'  sequence

SEQ ID NO: 47929 - DNA, 76 bp, Artificial Sequence; identical to SEQ ID NO: 3245
  Description of Artificial Sequence: Synthetic whey; 5' sequence + inner sequence + 3'  sequence

SEQ ID NO: 47930 - DNA, 76 bp, Artificial Sequence; identical to SEQ ID NO: 15767
  Description of Artificial Sequence: Synthetic whey; 5' sequence + inner sequence + 3'  sequence

SEQ ID NO: 47931 - DNA, 76 bp, Artificial Sequence
  Description of Artificial Sequence: Synthetic whey; 5' sequence + inner sequence + 3'  sequence
tagggaagagaaggacatatgatcgatgcgcagtcaggcataggtacgacacattgactagtacatgaccacttga

SEQ ID NO: 47932 - DNA, 76 bp, Artificial Sequence
  Description of Artificial Sequence: Synthetic whey; 5' sequence + inner sequence + 3'  sequence
tagggaagagaaggacatatgatcgtgcgcagaacgtgactgtcgtgcttggcttgactagtacatgaccacttga

SEQ ID NO: 47933 - DNA, 76 bp, Artificial Sequence; identical to SEQ ID NO: 3840
  Description of Artificial Sequence: Synthetic whey; 5' sequence + inner sequence + 3'  sequence

SEQ ID NO: 47934 - DNA, 76 bp, Artificial Sequence
  Description of Artificial Sequence: Synthetic whey; 5' sequence + inner sequence + 3'  sequence
tagggaagagaaggacatatgatccatcgcgtcactatcatgtgtgtcacttattgactagtacatgaccacttga

SEQ ID NO: 47935 - DNA, 76 bp, Artificial Sequence
  Description of Artificial Sequence: Synthetic whey; 5' sequence + inner sequence + 3'  sequence
tagggaagagaaggacatatgatggacgcagcgtaccgttcgagtggtacgtattgactagtacatgaccacttga

SEQ ID NO: 47936 - DNA, 76 bp, Artificial Sequence
  Description of Artificial Sequence: Synthetic whey; 5' sequence + inner sequence + 3'  sequence
tagggaagagaaggacatatgatacgtcacgatgcataacgtccttgtgcgcattgactagtacatgaccacttga

SEQ ID NO: 47937 - DNA, 76 bp, Artificial Sequence
  Description of Artificial Sequence: Synthetic whey; 5' sequence + inner sequence + 3'  sequence
tagggaagagaaggacatatgatggacgcaacgtaccgtatcatgaggccatgttgactagtacatgaccacttga

SEQ ID NO: 47938 - DNA, 76 bp, Artificial Sequence
  Description of Artificial Sequence: Synthetic whey; 5' sequence + inner sequence + 3'  sequence
tagggaagagaaggacatatgatgtcactttgcctgaccgtcaagttgcggcattgactagtacatgaccacttga

SEQ ID NO: 47939 - DNA, 76 bp, Artificial Sequence
  Description of Artificial Sequence: Synthetic whey; 5' sequence + inner sequence + 3'  sequence
tagggaagagaaggacatatgatggacgcaacgtaccgtatcgtgaccatgtgttgactagtacatgaccacttga

SEQ ID NO: 47940 - DNA, 76 bp, Artificial Sequence; identical to SEQ ID NO: 31195
  Description of Artificial Sequence: Synthetic whey; 5' sequence + inner sequence + 3'  sequence

SEQ ID NO: 47941 - DNA, 76 bp, Artificial Sequence
  Description of Artificial Sequence: Synthetic whey; 5' sequence + inner sequence + 3'  sequence
tagggaagagaaggacatatgatcgatgcacgatgcgacactgtcacgttgcgttgactagtacatgaccacttga

SEQ ID NO: 47942 - DNA, 76 bp, Artificial Sequence
  Description of Artificial Sequence: Synthetic whey; 5' sequence + inner sequence + 3'  sequence
tagggaagagaaggacatatgatccatcgcgtcactatcatgtgtgtcatgtattgactagtacatgaccacttga

SEQ ID NO: 47943 - DNA, 76 bp, Artificial Sequence; identical to SEQ ID NO: 31818
  Description of Artificial Sequence: Synthetic whey; 5' sequence + inner sequence + 3'  sequence

SEQ ID NO: 47944 - DNA, 76 bp, Artificial Sequence; identical to SEQ ID NO: 23962
  Description of Artificial Sequence: Synthetic whey; 5' sequence + inner sequence + 3'  sequence

SEQ ID NO: 47945 - DNA, 76 bp, Artificial Sequence
  Description of Artificial Sequence: Synthetic whey; 5' sequence + inner sequence + 3'  sequence
tagggaagagaaggacatatgatggccacagcgtacctcaacgtggacgtgaattgactagtacatgaccacttga

SEQ ID NO: 47946 - DNA, 76 bp, Artificial Sequence; identical to SEQ ID NO: 3159
  Description of Artificial Sequence: Synthetic whey; 5' sequence + inner sequence + 3'  sequence

SEQ ID NO: 47947 - DNA, 76 bp, Artificial Sequence
  Description of Artificial Sequence: Synthetic whey; 5' sequence + inner sequence + 3'  sequence
tagggaagagaaggacatatgatggacgcaacgtaacgtatcgtggccatgtattgactagtacatgaccacttga

SEQ ID NO: 47948 - DNA, 76 bp, Artificial Sequence; identical to SEQ ID NO: 19692
  Description of Artificial Sequence: Synthetic whey; 5' sequence + inner sequence + 3'  sequence

SEQ ID NO: 47949 - DNA, 76 bp, Artificial Sequence
  Description of Artificial Sequence: Synthetic whey; 5' sequence + inner sequence + 3'  sequence
tagggaagagaaggacatatgatccatcgcgtcactgtcatgtgtgtcacgtattgactagtacatgaccacttga

SEQ ID NO: 47950 - DNA, 71 bp, Artificial Sequence; identical to SEQ ID NO: 23136
  Description of Artificial Sequence: Synthetic whey; 5' sequence + inner sequence + 3'  sequence

SEQ ID NO: 47951 - DNA, 76 bp, Artificial Sequence
  Description of Artificial Sequence: Synthetic whey; 5' sequence + inner sequence + 3'  sequence
tagggaagagaaggacatatgatcgtacgcatcgagctgcacgtgtcgtcacgttgactagtacatgaccacttga

SEQ ID NO: 47952 - DNA, 76 bp, Artificial Sequence
  Description of Artificial Sequence: Synthetic whey; 5' sequence + inner sequence + 3'  sequence
tagggaagagaaggacatatgatacgtcacaacctcacgttggctagcgcggtttgactagtacatgaccacttga

SEQ ID NO: 47953 - DNA, 76 bp, Artificial Sequence
  Description of Artificial Sequence: Synthetic whey; 5' sequence + inner sequence + 3'  sequence
tagggaagagaaggacatatgatcatgtacgcactgtcaccttgcacgtcacgttgactagtacatgaccacttga

SEQ ID NO: 47954 - DNA, 76 bp, Artificial Sequence; identical to SEQ ID NO: 23534
  Description of Artificial Sequence: Synthetic whey; 5' sequence + inner sequence + 3'  sequence

SEQ ID NO: 47955 - DNA, 76 bp, Artificial Sequence; identical to SEQ ID NO: 3569
  Description of Artificial Sequence: Synthetic whey; 5' sequence + inner sequence + 3'  sequence

SEQ ID NO: 47956 - DNA, 76 bp, Artificial Sequence
  Description of Artificial Sequence: Synthetic whey; 5' sequence + inner sequence + 3'  sequence
tagggaagagaaggacatatgatgtcatgccattccttcgagtgtgacaggtattgactagtacatgaccacttga

SEQ ID NO: 47957 - DNA, 76 bp, Artificial Sequence; identical to SEQ ID NO: 23807
  Description of Artificial Sequence: Synthetic whey; 5' sequence + inner sequence + 3'  sequence

SEQ ID NO: 47958 - DNA, 76 bp, Artificial Sequence
  Description of Artificial Sequence: Synthetic whey; 5' sequence + inner sequence + 3'  sequence
tagggaagagaaggacatatgattgtgacgcacaggaggacgtacgctgcacgttgactagtacatgaccacttga

SEQ ID NO: 47959 - DNA, 76 bp, Artificial Sequence; identical to SEQ ID NO: 15936
  Description of Artificial Sequence: Synthetic whey; 5' sequence + inner sequence + 3'  sequence

SEQ ID NO: 47960 - DNA, 76 bp, Artificial Sequence; identical to SEQ ID NO: 35802
  Description of Artificial Sequence: Synthetic whey; 5' sequence + inner sequence + 3'  sequence

SEQ ID NO: 47961 - DNA, 76 bp, Artificial Sequence
  Description of Artificial Sequence: Synthetic whey; 5' sequence + inner sequence + 3'  sequence
tagggaagagaaggacatatgatggccacagcgtacctcaacgtggacgcgtattgactagtacatgaccacttga

SEQ ID NO: 47962 - DNA, 76 bp, Artificial Sequence; identical to SEQ ID NO: 19408
  Description of Artificial Sequence: Synthetic whey; 5' sequence + inner sequence + 3'  sequence

SEQ ID NO: 47963 - DNA, 76 bp, Artificial Sequence
  Description of Artificial Sequence: Synthetic whey; 5' sequence + inner sequence + 3'  sequence
tagggaagagaaggacatatgatgtacgcatcgtcccgtcatgtggttccgtcttgactagtacatgaccacttga

SEQ ID NO: 47964 - DNA, 76 bp, Artificial Sequence; identical to SEQ ID NO: 3147
  Description of Artificial Sequence: Synthetic whey; 5' sequence + inner sequence + 3'  sequence

SEQ ID NO: 47965 - DNA, 76 bp, Artificial Sequence; identical to SEQ ID NO: 11769
  Description of Artificial Sequence: Synthetic whey; 5' sequence + inner sequence + 3'  sequence

SEQ ID NO: 47966 - DNA, 76 bp, Artificial Sequence
  Description of Artificial Sequence: Synthetic whey; 5' sequence + inner sequence + 3'  sequence
tagggaagagaaggacatatgatcacgtcaggcagatggacgcatacgacacgttgactagtacatgaccacttga

SEQ ID NO: 47967 - DNA, 76 bp, Artificial Sequence
  Description of Artificial Sequence: Synthetic whey; 5' sequence + inner sequence + 3'  sequence
tagggaagagaaggacatatgatgcacgactcgcacactatcatgtaggcatgttgactagtacatgaccacttga

SEQ ID NO: 47968 - DNA, 76 bp, Artificial Sequence; identical to SEQ ID NO: 19803
  Description of Artificial Sequence: Synthetic whey; 5' sequence + inner sequence + 3'  sequence

SEQ ID NO: 47969 - DNA, 76 bp, Artificial Sequence; identical to SEQ ID NO: 3101
  Description of Artificial Sequence: Synthetic whey; 5' sequence + inner sequence + 3'  sequence

SEQ ID NO: 47970 - DNA, 76 bp, Artificial Sequence
  Description of Artificial Sequence: Synthetic whey; 5' sequence + inner sequence + 3'  sequence
tagggaagagaaggacatatgatgtacgcatcgtccagtcatgtggttccgtattgactagtacatgaccacttga

SEQ ID NO: 47971 - DNA, 76 bp, Artificial Sequence
  Description of Artificial Sequence: Synthetic whey; 5' sequence + inner sequence + 3'  sequence
tagggaagagaaggacatatgatgcacgactcgcaccctgtcatgaggccatgttgactagtacatgaccacttga

SEQ ID NO: 47972 - DNA, 76 bp, Artificial Sequence
  Description of Artificial Sequence: Synthetic whey; 5' sequence + inner sequence + 3'  sequence
tagggaagagaaggacatatgatgcgtcacacagcagcgtgttacgtcctgccttgactagtacatgaccacttga

SEQ ID NO: 47973 - DNA, 76 bp, Artificial Sequence; identical to SEQ ID NO: 35484
  Description of Artificial Sequence: Synthetic whey; 5' sequence + inner sequence + 3'  sequence

SEQ ID NO: 47974 - DNA, 76 bp, Artificial Sequence; identical to SEQ ID NO: 3091
  Description of Artificial Sequence: Synthetic whey; 5' sequence + inner sequence + 3'  sequence

SEQ ID NO: 47975 - DNA, 76 bp, Artificial Sequence
  Description of Artificial Sequence: Synthetic whey; 5' sequence + inner sequence + 3'  sequence
tagggaagagaaggacatatgatgtcattccgcatcccacacgtgggcacgtattgactagtacatgaccacttga

SEQ ID NO: 47976 - DNA, 76 bp, Artificial Sequence; identical to SEQ ID NO: 31744
  Description of Artificial Sequence: Synthetic whey; 5' sequence + inner sequence + 3'  sequence

SEQ ID NO: 47977 - DNA, 76 bp, Artificial Sequence
  Description of Artificial Sequence: Synthetic whey; 5' sequence + inner sequence + 3'  sequence
tagggaagagaaggacatatgatcgtggcacgtcacgcatgatgcacttcggtttgactagtacatgaccacttga

SEQ ID NO: 47978 - DNA, 76 bp, Artificial Sequence
  Description of Artificial Sequence: Synthetic whey; 5' sequence + inner sequence + 3'  sequence
tagggaagagaaggacatatgatcgtgatggcgaacgtgtactgcgacatgccttgactagtacatgaccacttga

SEQ ID NO: 47979 - DNA, 76 bp, Artificial Sequence
  Description of Artificial Sequence: Synthetic whey; 5' sequence + inner sequence + 3'  sequence
tagggaagagaaggacatatgatgtcacgccatcccttcgagtgtgacaggtattgactagtacatgaccacttga

SEQ ID NO: 47980 - DNA, 76 bp, Artificial Sequence; identical to SEQ ID NO: 3653
  Description of Artificial Sequence: Synthetic whey; 5' sequence + inner sequence + 3'  sequence

SEQ ID NO: 47981 - DNA, 76 bp, Artificial Sequence
  Description of Artificial Sequence: Synthetic whey; 5' sequence + inner sequence + 3'  sequence
tagggaagagaaggacatatgatgtcatgcaatcccttcgagtgtgacaggtattgactagtacatgaccacttga

SEQ ID NO: 47982 - DNA, 76 bp, Artificial Sequence
  Description of Artificial Sequence: Synthetic whey; 5' sequence + inner sequence + 3'  sequence
tagggaagagaaggacatatgatgtcatcccatcccttcgagtgtgacaggtattgactagtacatgaccacttga

SEQ ID NO: 47983 - DNA, 76 bp, Artificial Sequence
  Description of Artificial Sequence: Synthetic whey; 5' sequence + inner sequence + 3'  sequence
tagggaagagaaggacatatgatgcacgcaacgtaccgtatcgtggccatgtgttgactagtacatgaccacttga

SEQ ID NO: 47984 - DNA, 76 bp, Artificial Sequence; identical to SEQ ID NO: 3448
  Description of Artificial Sequence: Synthetic whey; 5' sequence + inner sequence + 3'  sequence

SEQ ID NO: 47985 - DNA, 76 bp, Artificial Sequence
  Description of Artificial Sequence: Synthetic whey; 5' sequence + inner sequence + 3'  sequence
tagggaagagaaggacatatgatggacgcaacgtaccgtcatgtggttccgtattgactagtacatgaccacttga

SEQ ID NO: 47986 - DNA, 76 bp, Artificial Sequence; identical to SEQ ID NO: 23574
  Description of Artificial Sequence: Synthetic whey; 5' sequence + inner sequence + 3'  sequence

SEQ ID NO: 47987 - DNA, 76 bp, Artificial Sequence; identical to SEQ ID NO: 19695
  Description of Artificial Sequence: Synthetic whey; 5' sequence + inner sequence + 3'  sequence

SEQ ID NO: 47988 - DNA, 76 bp, Artificial Sequence; identical to SEQ ID NO: 3102
  Description of Artificial Sequence: Synthetic whey; 5' sequence + inner sequence + 3'  sequence

SEQ ID NO: 47989 - DNA, 76 bp, Artificial Sequence
  Description of Artificial Sequence: Synthetic whey; 5' sequence + inner sequence + 3'  sequence
tagggaagagaaggacatatgatcgtgcaacgcgagctgcgacgtacgacacgttgactagtacatgaccacttga

SEQ ID NO: 47990 - DNA, 76 bp, Artificial Sequence; identical to SEQ ID NO: 3788
  Description of Artificial Sequence: Synthetic whey; 5' sequence + inner sequence + 3'  sequence

SEQ ID NO: 47991 - DNA, 76 bp, Artificial Sequence
  Description of Artificial Sequence: Synthetic whey; 5' sequence + inner sequence + 3'  sequence
tagggaagagaaggacatatgatggacgcaacgtaccgtatcgtggctatgtgttgactagtacatgaccacttga

SEQ ID NO: 47992 - DNA, 76 bp, Artificial Sequence
  Description of Artificial Sequence: Synthetic whey; 5' sequence + inner sequence + 3'  sequence
tagggaagagaaggacatatgatgtcactgtgcctgaccatcaagttgcggcattgactagtacatgaccacttga

SEQ ID NO: 47993 - DNA, 76 bp, Artificial Sequence
  Description of Artificial Sequence: Synthetic whey; 5' sequence + inner sequence + 3'  sequence
tagggaagagaaggacatatgatgcaacgcgaggacgtactgctgcctacacgttgactagtacatgaccacttga

SEQ ID NO: 47994 - DNA, 76 bp, Artificial Sequence
  Description of Artificial Sequence: Synthetic whey; 5' sequence + inner sequence + 3'  sequence
tagggaagagaaggacatatgatgcgctaggcgtgacgtacacatgctgcacgttgactagtacatgaccacttga

SEQ ID NO: 47995 - DNA, 76 bp, Artificial Sequence; identical to SEQ ID NO: 11763
  Description of Artificial Sequence: Synthetic whey; 5' sequence + inner sequence + 3'  sequence

SEQ ID NO: 47996 - DNA, 76 bp, Artificial Sequence
  Description of Artificial Sequence: Synthetic whey; 5' sequence + inner sequence + 3'  sequence
tagggaagagaaggacatatgatcacgtacagtgaggcgtacctgcatgcgcattgactagtacatgaccacttga

SEQ ID NO: 47997 - DNA, 76 bp, Artificial Sequence
  Description of Artificial Sequence: Synthetic whey; 5' sequence + inner sequence + 3'  sequence
tagggaagagaaggacatatgatcgacatgagcacggtatgcctcactgcacgttgactagtacatgaccacttga

SEQ ID NO: 47998 - DNA, 76 bp, Artificial Sequence
  Description of Artificial Sequence: Synthetic whey; 5' sequence + inner sequence + 3'  sequence
tagggaagagaaggacatatgatcgtgcacgaggacgacgaacgcactacgcattgactagtacatgaccacttga

SEQ ID NO: 47999 - DNA, 76 bp, Artificial Sequence
  Description of Artificial Sequence: Synthetic whey; 5' sequence + inner sequence + 3'  sequence
tagggaagagaaggacatatgatagccacagcgtacctcaacgtggacgtgcattgactagtacatgaccacttga

SEQ ID NO: 48000 - DNA, 76 bp, Artificial Sequence
  Description of Artificial Sequence: Synthetic whey; 5' sequence + inner sequence + 3'  sequence
tagggaagagaaggacatatgattcgacggcaaggtgaggcacgtgcatcgcgttgactagtacatgaccacttga

SEQ ID NO: 48001 - DNA, 76 bp, Artificial Sequence
  Description of Artificial Sequence: Synthetic whey; 5' sequence + inner sequence + 3'  sequence
tagggaagagaaggacatatgatggactcaacgtaccgtatcgtggccatgtattgactagtacatgaccacttga

SEQ ID NO: 48002 - DNA, 76 bp, Artificial Sequence; identical to SEQ ID NO: 35341
  Description of Artificial Sequence: Synthetic whey; 5' sequence + inner sequence + 3'  sequence

SEQ ID NO: 48003 - DNA, 30 bp, Artificial Sequence; identical to SEQ ID NO: 4
  Description of Artificial Sequence: Synthetic casein; inner sequence

SEQ ID NO: 48004 - DNA, 30 bp, Artificial Sequence; identical to SEQ ID NO: 3
  Description of Artificial Sequence: Synthetic casein; inner sequence

SEQ ID NO: 48005 - DNA, 30 bp, Artificial Sequence; identical to SEQ ID NO: 21
  Description of Artificial Sequence: Synthetic casein; inner sequence

SEQ ID NO: 48006 - DNA, 30 bp, Artificial Sequence; identical to SEQ ID NO: 6
  Description of Artificial Sequence: Synthetic casein; inner sequence

SEQ ID NO: 48007 - DNA, 30 bp, Artificial Sequence; identical to SEQ ID NO: 52
  Description of Artificial Sequence: Synthetic casein; inner sequence

SEQ ID NO: 48008 - DNA, 30 bp, Artificial Sequence; identical to SEQ ID NO: 10
  Description of Artificial Sequence: Synthetic casein; inner sequence

SEQ ID NO: 48009 - DNA, 30 bp, Artificial Sequence; identical to SEQ ID NO: 20
  Description of Artificial Sequence: Synthetic casein; inner sequence

SEQ ID NO: 48010 - DNA, 30 bp, Artificial Sequence; identical to SEQ ID NO: 5
  Description of Artificial Sequence: Synthetic casein; inner sequence

SEQ ID NO: 48011 - DNA, 30 bp, Artificial Sequence; identical to SEQ ID NO: 8
  Description of Artificial Sequence: Synthetic casein; inner sequence

SEQ ID NO: 48012 - DNA, 30 bp, Artificial Sequence; identical to SEQ ID NO: 7
  Description of Artificial Sequence: Synthetic casein; inner sequence

SEQ ID NO: 48013 - DNA, 30 bp, Artificial Sequence; identical to SEQ ID NO: 81
  Description of Artificial Sequence: Synthetic casein; inner sequence

SEQ ID NO: 48014 - DNA, 30 bp, Artificial Sequence; identical to SEQ ID NO: 11
  Description of Artificial Sequence: Synthetic casein; inner sequence

SEQ ID NO: 48015 - DNA, 28 bp, Artificial Sequence
  Description of Artificial Sequence: Synthetic casein; inner sequence
ggacgcaacgtaccgtatcgtggccatg

SEQ ID NO: 48016 - DNA, 30 bp, Artificial Sequence; identical to SEQ ID NO: 201
  Description of Artificial Sequence: Synthetic casein; inner sequence

SEQ ID NO: 48017 - DNA, 30 bp, Artificial Sequence; identical to SEQ ID NO: 33
  Description of Artificial Sequence: Synthetic casein; inner sequence

SEQ ID NO: 48018 - DNA, 30 bp, Artificial Sequence; identical to SEQ ID NO: 30
  Description of Artificial Sequence: Synthetic casein; inner sequence

SEQ ID NO: 48019 - DNA, 30 bp, Artificial Sequence; identical to SEQ ID NO: 220
  Description of Artificial Sequence: Synthetic casein; inner sequence

SEQ ID NO: 48020 - DNA, 30 bp, Artificial Sequence; identical to SEQ ID NO: 40
  Description of Artificial Sequence: Synthetic casein; inner sequence

SEQ ID NO: 48021 - DNA, 30 bp, Artificial Sequence; identical to SEQ ID NO: 9
  Description of Artificial Sequence: Synthetic casein; inner sequence

SEQ ID NO: 48022 - DNA, 30 bp, Artificial Sequence; identical to SEQ ID NO: 23
  Description of Artificial Sequence: Synthetic casein; inner sequence

SEQ ID NO: 48023 - DNA, 30 bp, Artificial Sequence; identical to SEQ ID NO: 46
  Description of Artificial Sequence: Synthetic casein; inner sequence

SEQ ID NO: 48024 - DNA, 30 bp, Artificial Sequence; identical to SEQ ID NO: 279
  Description of Artificial Sequence: Synthetic casein; inner sequence

SEQ ID NO: 48025 - DNA, 30 bp, Artificial Sequence; identical to SEQ ID NO: 16640
  Description of Artificial Sequence: Synthetic casein; inner sequence

SEQ ID NO: 48026 - DNA, 30 bp, Artificial Sequence; identical to SEQ ID NO: 28
  Description of Artificial Sequence: Synthetic casein; inner sequence

SEQ ID NO: 48027 - DNA, 30 bp, Artificial Sequence; identical to SEQ ID NO: 78
  Description of Artificial Sequence: Synthetic casein; inner sequence

SEQ ID NO: 48028 - DNA, 30 bp, Artificial Sequence; identical to SEQ ID NO: 12
  Description of Artificial Sequence: Synthetic casein; inner sequence

SEQ ID NO: 48029 - DNA, 30 bp, Artificial Sequence; identical to SEQ ID NO: 14
  Description of Artificial Sequence: Synthetic casein; inner sequence

SEQ ID NO: 48030 - DNA, 30 bp, Artificial Sequence; identical to SEQ ID NO: 36
  Description of Artificial Sequence: Synthetic casein; inner sequence

SEQ ID NO: 48031 - DNA, 30 bp, Artificial Sequence; identical to SEQ ID NO: 79
  Description of Artificial Sequence: Synthetic casein; inner sequence

SEQ ID NO: 48032 - DNA, 30 bp, Artificial Sequence; identical to SEQ ID NO: 28278
  Description of Artificial Sequence: Synthetic casein; inner sequence

SEQ ID NO: 48033 - DNA, 30 bp, Artificial Sequence; identical to SEQ ID NO: 41
  Description of Artificial Sequence: Synthetic casein; inner sequence

SEQ ID NO: 48034 - DNA, 30 bp, Artificial Sequence; identical to SEQ ID NO: 526
  Description of Artificial Sequence: Synthetic casein; inner sequence

SEQ ID NO: 48035 - DNA, 30 bp, Artificial Sequence; identical to SEQ ID NO: 506
  Description of Artificial Sequence: Synthetic casein; inner sequence

SEQ ID NO: 48036 - DNA, 30 bp, Artificial Sequence; identical to SEQ ID NO: 28199
  Description of Artificial Sequence: Synthetic casein; inner sequence

SEQ ID NO: 48037 - DNA, 30 bp, Artificial Sequence; identical to SEQ ID NO: 458
  Description of Artificial Sequence: Synthetic casein; inner sequence

SEQ ID NO: 48038 - DNA, 30 bp, Artificial Sequence; identical to SEQ ID NO: 4659
  Description of Artificial Sequence: Synthetic casein; inner sequence

SEQ ID NO: 48039 - DNA, 30 bp, Artificial Sequence; identical to SEQ ID NO: 28208
  Description of Artificial Sequence: Synthetic casein; inner sequence

SEQ ID NO: 48040 - DNA, 30 bp, Artificial Sequence; identical to SEQ ID NO: 108
  Description of Artificial Sequence: Synthetic casein; inner sequence

SEQ ID NO: 48041 - DNA, 30 bp, Artificial Sequence; identical to SEQ ID NO: 15
  Description of Artificial Sequence: Synthetic casein; inner sequence

SEQ ID NO: 48042 - DNA, 30 bp, Artificial Sequence; identical to SEQ ID NO: 28252
  Description of Artificial Sequence: Synthetic casein; inner sequence

SEQ ID NO: 48043 - DNA, 30 bp, Artificial Sequence; identical to SEQ ID NO: 20495
  Description of Artificial Sequence: Synthetic casein; inner sequence

SEQ ID NO: 48044 - DNA, 30 bp, Artificial Sequence; identical to SEQ ID NO: 381
  Description of Artificial Sequence: Synthetic casein; inner sequence

SEQ ID NO: 48045 - DNA, 30 bp, Artificial Sequence; identical to SEQ ID NO: 323
  Description of Artificial Sequence: Synthetic casein; inner sequence

SEQ ID NO: 48046 - DNA, 30 bp, Artificial Sequence; identical to SEQ ID NO: 20468
  Description of Artificial Sequence: Synthetic casein; inner sequence

SEQ ID NO: 48047 - DNA, 30 bp, Artificial Sequence; identical to SEQ ID NO: 281
  Description of Artificial Sequence: Synthetic casein; inner sequence

SEQ ID NO: 48048 - DNA, 29 bp, Artificial Sequence
  Description of Artificial Sequence: Synthetic casein; inner sequence
gcacgccgatgccctcatgtggccgtgga

SEQ ID NO: 48049 - DNA, 30 bp, Artificial Sequence; identical to SEQ ID NO: 71
  Description of Artificial Sequence: Synthetic casein; inner sequence

SEQ ID NO: 48050 - DNA, 30 bp, Artificial Sequence; identical to SEQ ID NO: 13
  Description of Artificial Sequence: Synthetic casein; inner sequence

SEQ ID NO: 48051 - DNA, 30 bp, Artificial Sequence; identical to SEQ ID NO: 16818
  Description of Artificial Sequence: Synthetic casein; inner sequence

SEQ ID NO: 48052 - DNA, 31 bp, Artificial Sequence; identical to SEQ ID NO: 16373
  Description of Artificial Sequence: Synthetic casein; inner sequence

SEQ ID NO: 48053 - DNA, 30 bp, Artificial Sequence; identical to SEQ ID NO: 45
  Description of Artificial Sequence: Synthetic casein; inner sequence

SEQ ID NO: 48054 - DNA, 30 bp, Artificial Sequence; identical to SEQ ID NO: 121
  Description of Artificial Sequence: Synthetic casein; inner sequence

SEQ ID NO: 48055 - DNA, 30 bp, Artificial Sequence; identical to SEQ ID NO: 28108
  Description of Artificial Sequence: Synthetic casein; inner sequence

SEQ ID NO: 48056 - DNA, 30 bp, Artificial Sequence; identical to SEQ ID NO: 359
  Description of Artificial Sequence: Synthetic casein; inner sequence

SEQ ID NO: 48057 - DNA, 30 bp, Artificial Sequence; identical to SEQ ID NO: 20540
  Description of Artificial Sequence: Synthetic casein; inner sequence

SEQ ID NO: 48058 - DNA, 30 bp, Artificial Sequence; identical to SEQ ID NO: 28436
  Description of Artificial Sequence: Synthetic casein; inner sequence

SEQ ID NO: 48059 - DNA, 30 bp, Artificial Sequence; identical to SEQ ID NO: 20917
  Description of Artificial Sequence: Synthetic casein; inner sequence

SEQ ID NO: 48060 - DNA, 30 bp, Artificial Sequence; identical to SEQ ID NO: 491
  Description of Artificial Sequence: Synthetic casein; inner sequence

SEQ ID NO: 48061 - DNA, 30 bp, Artificial Sequence; identical to SEQ ID NO: 44212
  Description of Artificial Sequence: Synthetic casein; inner sequence

SEQ ID NO: 48062 - DNA, 29 bp, Artificial Sequence
  Description of Artificial Sequence: Synthetic casein; inner sequence
cgtgtgtgacgtacatgacgtgcttcgtg

SEQ ID NO: 48063 - DNA, 30 bp, Artificial Sequence; identical to SEQ ID NO: 35
  Description of Artificial Sequence: Synthetic casein; inner sequence

SEQ ID NO: 48064 - DNA, 30 bp, Artificial Sequence; identical to SEQ ID NO: 16266
  Description of Artificial Sequence: Synthetic casein; inner sequence

SEQ ID NO: 48065 - DNA, 30 bp, Artificial Sequence; identical to SEQ ID NO: 25
  Description of Artificial Sequence: Synthetic casein; inner sequence

SEQ ID NO: 48066 - DNA, 30 bp, Artificial Sequence; identical to SEQ ID NO: 28526
  Description of Artificial Sequence: Synthetic casein; inner sequence

SEQ ID NO: 48067 - DNA, 30 bp, Artificial Sequence; identical to SEQ ID NO: 18
  Description of Artificial Sequence: Synthetic casein; inner sequence

SEQ ID NO: 48068 - DNA, 30 bp, Artificial Sequence; identical to SEQ ID NO: 16837
  Description of Artificial Sequence: Synthetic casein; inner sequence

SEQ ID NO: 48069 - DNA, 30 bp, Artificial Sequence; identical to SEQ ID NO: 340
  Description of Artificial Sequence: Synthetic casein; inner sequence

SEQ ID NO: 48070 - DNA, 30 bp, Artificial Sequence; identical to SEQ ID NO: 28477
  Description of Artificial Sequence: Synthetic casein; inner sequence

SEQ ID NO: 48071 - DNA, 30 bp, Artificial Sequence; identical to SEQ ID NO: 17
  Description of Artificial Sequence: Synthetic casein; inner sequence

SEQ ID NO: 48072 - DNA, 30 bp, Artificial Sequence; identical to SEQ ID NO: 28699
  Description of Artificial Sequence: Synthetic casein; inner sequence

SEQ ID NO: 48073 - DNA, 30 bp, Artificial Sequence; identical to SEQ ID NO: 20105
  Description of Artificial Sequence: Synthetic casein; inner sequence

SEQ ID NO: 48074 - DNA, 30 bp, Artificial Sequence; identical to SEQ ID NO: 746
  Description of Artificial Sequence: Synthetic casein; inner sequence

SEQ ID NO: 48075 - DNA, 30 bp, Artificial Sequence; identical to SEQ ID NO: 44219
  Description of Artificial Sequence: Synthetic casein; inner sequence

SEQ ID NO: 48076 - DNA, 30 bp, Artificial Sequence; identical to SEQ ID NO: 39
  Description of Artificial Sequence: Synthetic casein; inner sequence

SEQ ID NO: 48077 - DNA, 30 bp, Artificial Sequence; identical to SEQ ID NO: 28147
  Description of Artificial Sequence: Synthetic casein; inner sequence

SEQ ID NO: 48078 - DNA, 30 bp, Artificial Sequence; identical to SEQ ID NO: 53
  Description of Artificial Sequence: Synthetic casein; inner sequence

SEQ ID NO: 48079 - DNA, 30 bp, Artificial Sequence; identical to SEQ ID NO: 28382
  Description of Artificial Sequence: Synthetic casein; inner sequence

SEQ ID NO: 48080 - DNA, 30 bp, Artificial Sequence; identical to SEQ ID NO: 28320
  Description of Artificial Sequence: Synthetic casein; inner sequence

SEQ ID NO: 48081 - DNA, 30 bp, Artificial Sequence; identical to SEQ ID NO: 66
  Description of Artificial Sequence: Synthetic casein; inner sequence

SEQ ID NO: 48082 - DNA, 30 bp, Artificial Sequence; identical to SEQ ID NO: 28381
  Description of Artificial Sequence: Synthetic casein; inner sequence

SEQ ID NO: 48083 - DNA, 30 bp, Artificial Sequence; identical to SEQ ID NO: 28541
  Description of Artificial Sequence: Synthetic casein; inner sequence

SEQ ID NO: 48084 - DNA, 30 bp, Artificial Sequence; identical to SEQ ID NO: 28751
  Description of Artificial Sequence: Synthetic casein; inner sequence

SEQ ID NO: 48085 - DNA, 30 bp, Artificial Sequence; identical to SEQ ID NO: 28425
  Description of Artificial Sequence: Synthetic casein; inner sequence

SEQ ID NO: 48086 - DNA, 31 bp, Artificial Sequence; identical to SEQ ID NO: 971
  Description of Artificial Sequence: Synthetic casein; inner sequence

SEQ ID NO: 48087 - DNA, 30 bp, Artificial Sequence; identical to SEQ ID NO: 67
  Description of Artificial Sequence: Synthetic casein; inner sequence

SEQ ID NO: 48088 - DNA, 30 bp, Artificial Sequence; identical to SEQ ID NO: 174
  Description of Artificial Sequence: Synthetic casein; inner sequence

SEQ ID NO: 48089 - DNA, 30 bp, Artificial Sequence; identical to SEQ ID NO: 16211
  Description of Artificial Sequence: Synthetic casein; inner sequence

SEQ ID NO: 48090 - DNA, 30 bp, Artificial Sequence; identical to SEQ ID NO: 517
  Description of Artificial Sequence: Synthetic casein; inner sequence

SEQ ID NO: 48091 - DNA, 30 bp, Artificial Sequence; identical to SEQ ID NO: 231
  Description of Artificial Sequence: Synthetic casein; inner sequence

SEQ ID NO: 48092 - DNA, 30 bp, Artificial Sequence; identical to SEQ ID NO: 63
  Description of Artificial Sequence: Synthetic casein; inner sequence

SEQ ID NO: 48093 - DNA, 30 bp, Artificial Sequence; identical to SEQ ID NO: 4627
  Description of Artificial Sequence: Synthetic casein; inner sequence

SEQ ID NO: 48094 - DNA, 30 bp, Artificial Sequence; identical to SEQ ID NO: 54
  Description of Artificial Sequence: Synthetic casein; inner sequence

SEQ ID NO: 48095 - DNA, 30 bp, Artificial Sequence; identical to SEQ ID NO: 28379
  Description of Artificial Sequence: Synthetic casein; inner sequence

SEQ ID NO: 48096 - DNA, 30 bp, Artificial Sequence; identical to SEQ ID NO: 442
  Description of Artificial Sequence: Synthetic casein; inner sequence

SEQ ID NO: 48097 - DNA, 30 bp, Artificial Sequence; identical to SEQ ID NO: 49
  Description of Artificial Sequence: Synthetic casein; inner sequence

SEQ ID NO: 48098 - DNA, 30 bp, Artificial Sequence; identical to SEQ ID NO: 145
  Description of Artificial Sequence: Synthetic casein; inner sequence

SEQ ID NO: 48099 - DNA, 30 bp, Artificial Sequence; identical to SEQ ID NO: 283
  Description of Artificial Sequence: Synthetic casein; inner sequence

SEQ ID NO: 48100 - DNA, 24 bp, Artificial Sequence
  Description of Artificial Sequence: Synthetic casein; inner sequence
gcgtcacggcatacgtactgcgca

SEQ ID NO: 48101 - DNA, 30 bp, Artificial Sequence; identical to SEQ ID NO: 184
  Description of Artificial Sequence: Synthetic casein; inner sequence

SEQ ID NO: 48102 - DNA, 30 bp, Artificial Sequence; identical to SEQ ID NO: 28310
  Description of Artificial Sequence: Synthetic casein; inner sequence

SEQ ID NO: 48103 - DNA, 30 bp, Artificial Sequence; identical to SEQ ID NO: 20524
  Description of Artificial Sequence: Synthetic casein; inner sequence

SEQ ID NO: 48104 - DNA, 30 bp, Artificial Sequence; identical to SEQ ID NO: 419
  Description of Artificial Sequence: Synthetic casein; inner sequence

SEQ ID NO: 48105 - DNA, 30 bp, Artificial Sequence; identical to SEQ ID NO: 59
  Description of Artificial Sequence: Synthetic casein; inner sequence

SEQ ID NO: 48106 - DNA, 29 bp, Artificial Sequence
  Description of Artificial Sequence: Synthetic casein; inner sequence
cacgtgcatggacgcgtcgtaccgtggca

SEQ ID NO: 48107 - DNA, 30 bp, Artificial Sequence; identical to SEQ ID NO: 16634
  Description of Artificial Sequence: Synthetic casein; inner sequence

SEQ ID NO: 48108 - DNA, 30 bp, Artificial Sequence; identical to SEQ ID NO: 613
  Description of Artificial Sequence: Synthetic casein; inner sequence

SEQ ID NO: 48109 - DNA, 30 bp, Artificial Sequence; identical to SEQ ID NO: 28985
  Description of Artificial Sequence: Synthetic casein; inner sequence

SEQ ID NO: 48110 - DNA, 30 bp, Artificial Sequence; identical to SEQ ID NO: 111
  Description of Artificial Sequence: Synthetic casein; inner sequence

SEQ ID NO: 48111 - DNA, 30 bp, Artificial Sequence; identical to SEQ ID NO: 20486
  Description of Artificial Sequence: Synthetic casein; inner sequence

SEQ ID NO: 48112 - DNA, 30 bp, Artificial Sequence; identical to SEQ ID NO: 12997
  Description of Artificial Sequence: Synthetic casein; inner sequence

SEQ ID NO: 48113 - DNA, 30 bp, Artificial Sequence; identical to SEQ ID NO: 16603
  Description of Artificial Sequence: Synthetic casein; inner sequence

SEQ ID NO: 48114 - DNA, 30 bp, Artificial Sequence; identical to SEQ ID NO: 37
  Description of Artificial Sequence: Synthetic casein; inner sequence

SEQ ID NO: 48115 - DNA, 30 bp, Artificial Sequence; identical to SEQ ID NO: 44321
  Description of Artificial Sequence: Synthetic casein; inner sequence

SEQ ID NO: 48116 - DNA, 30 bp, Artificial Sequence; identical to SEQ ID NO: 28939
  Description of Artificial Sequence: Synthetic casein; inner sequence

SEQ ID NO: 48117 - DNA, 30 bp, Artificial Sequence; identical to SEQ ID NO: 28243
  Description of Artificial Sequence: Synthetic casein; inner sequence

SEQ ID NO: 48118 - DNA, 30 bp, Artificial Sequence; identical to SEQ ID NO: 4429
  Description of Artificial Sequence: Synthetic casein; inner sequence

SEQ ID NO: 48119 - DNA, 30 bp, Artificial Sequence; identical to SEQ ID NO: 212
  Description of Artificial Sequence: Synthetic casein; inner sequence

SEQ ID NO: 48120 - DNA, 30 bp, Artificial Sequence; identical to SEQ ID NO: 886
  Description of Artificial Sequence: Synthetic casein; inner sequence

SEQ ID NO: 48121 - DNA, 30 bp, Artificial Sequence; identical to SEQ ID NO: 687
  Description of Artificial Sequence: Synthetic casein; inner sequence

SEQ ID NO: 48122 - DNA, 30 bp, Artificial Sequence; identical to SEQ ID NO: 44111
  Description of Artificial Sequence: Synthetic casein; inner sequence

SEQ ID NO: 48123 - DNA, 30 bp, Artificial Sequence; identical to SEQ ID NO: 44742
  Description of Artificial Sequence: Synthetic casein; inner sequence

SEQ ID NO: 48124 - DNA, 30 bp, Artificial Sequence; identical to SEQ ID NO: 44753
  Description of Artificial Sequence: Synthetic casein; inner sequence

SEQ ID NO: 48125 - DNA, 30 bp, Artificial Sequence; identical to SEQ ID NO: 123
  Description of Artificial Sequence: Synthetic casein; inner sequence

SEQ ID NO: 48126 - DNA, 30 bp, Artificial Sequence; identical to SEQ ID NO: 28221
  Description of Artificial Sequence: Synthetic casein; inner sequence

SEQ ID NO: 48127 - DNA, 30 bp, Artificial Sequence; identical to SEQ ID NO: 243
  Description of Artificial Sequence: Synthetic casein; inner sequence

SEQ ID NO: 48128 - DNA, 30 bp, Artificial Sequence; identical to SEQ ID NO: 28743
  Description of Artificial Sequence: Synthetic casein; inner sequence

SEQ ID NO: 48129 - DNA, 30 bp, Artificial Sequence; identical to SEQ ID NO: 172
  Description of Artificial Sequence: Synthetic casein; inner sequence

SEQ ID NO: 48130 - DNA, 30 bp, Artificial Sequence; identical to SEQ ID NO: 44446
  Description of Artificial Sequence: Synthetic casein; inner sequence

SEQ ID NO: 48131 - DNA, 30 bp, Artificial Sequence; identical to SEQ ID NO: 20473
  Description of Artificial Sequence: Synthetic casein; inner sequence

SEQ ID NO: 48132 - DNA, 30 bp, Artificial Sequence; identical to SEQ ID NO: 44216
  Description of Artificial Sequence: Synthetic casein; inner sequence

SEQ ID NO: 48133 - DNA, 30 bp, Artificial Sequence; identical to SEQ ID NO: 414
  Description of Artificial Sequence: Synthetic casein; inner sequence

SEQ ID NO: 48134 - DNA, 30 bp, Artificial Sequence; identical to SEQ ID NO: 622
  Description of Artificial Sequence: Synthetic casein; inner sequence

SEQ ID NO: 48135 - DNA, 30 bp, Artificial Sequence; identical to SEQ ID NO: 44623
  Description of Artificial Sequence: Synthetic casein; inner sequence

SEQ ID NO: 48136 - DNA, 30 bp, Artificial Sequence; identical to SEQ ID NO: 16859
  Description of Artificial Sequence: Synthetic casein; inner sequence

SEQ ID NO: 48137 - DNA, 30 bp, Artificial Sequence; identical to SEQ ID NO: 4289
  Description of Artificial Sequence: Synthetic casein; inner sequence

SEQ ID NO: 48138 - DNA, 30 bp, Artificial Sequence
  Description of Artificial Sequence: Synthetic casein; inner sequence
gcgacgtggcgcaacggatggacgtacgca

SEQ ID NO: 48139 - DNA, 30 bp, Artificial Sequence; identical to SEQ ID NO: 684
  Description of Artificial Sequence: Synthetic casein; inner sequence

SEQ ID NO: 48140 - DNA, 30 bp, Artificial Sequence; identical to SEQ ID NO: 44245
  Description of Artificial Sequence: Synthetic casein; inner sequence

SEQ ID NO: 48141 - DNA, 30 bp, Artificial Sequence; identical to SEQ ID NO: 379
  Description of Artificial Sequence: Synthetic casein; inner sequence

SEQ ID NO: 48142 - DNA, 30 bp, Artificial Sequence; identical to SEQ ID NO: 138
  Description of Artificial Sequence: Synthetic casein; inner sequence

SEQ ID NO: 48143 - DNA, 30 bp, Artificial Sequence; identical to SEQ ID NO: 611
  Description of Artificial Sequence: Synthetic casein; inner sequence

SEQ ID NO: 48144 - DNA, 30 bp, Artificial Sequence; identical to SEQ ID NO: 28782
  Description of Artificial Sequence: Synthetic casein; inner sequence

SEQ ID NO: 48145 - DNA, 30 bp, Artificial Sequence; identical to SEQ ID NO: 28195
  Description of Artificial Sequence: Synthetic casein; inner sequence

SEQ ID NO: 48146 - DNA, 30 bp, Artificial Sequence; identical to SEQ ID NO: 467
  Description of Artificial Sequence: Synthetic casein; inner sequence

SEQ ID NO: 48147 - DNA, 30 bp, Artificial Sequence; identical to SEQ ID NO: 44900
  Description of Artificial Sequence: Synthetic casein; inner sequence

SEQ ID NO: 48148 - DNA, 30 bp, Artificial Sequence; identical to SEQ ID NO: 28907
  Description of Artificial Sequence: Synthetic casein; inner sequence

SEQ ID NO: 48149 - DNA, 30 bp, Artificial Sequence; identical to SEQ ID NO: 343
  Description of Artificial Sequence: Synthetic casein; inner sequence

SEQ ID NO: 48150 - DNA, 30 bp, Artificial Sequence; identical to SEQ ID NO: 44951
  Description of Artificial Sequence: Synthetic casein; inner sequence

SEQ ID NO: 48151 - DNA, 30 bp, Artificial Sequence; identical to SEQ ID NO: 20151
  Description of Artificial Sequence: Synthetic casein; inner sequence

SEQ ID NO: 48152 - DNA, 30 bp, Artificial Sequence; identical to SEQ ID NO: 28497
  Description of Artificial Sequence: Synthetic casein; inner sequence

SEQ ID NO: 48153 - DNA, 30 bp, Artificial Sequence; identical to SEQ ID NO: 28233
  Description of Artificial Sequence: Synthetic casein; inner sequence

SEQ ID NO: 48154 - DNA, 30 bp, Artificial Sequence; identical to SEQ ID NO: 194
  Description of Artificial Sequence: Synthetic casein; inner sequence

SEQ ID NO: 48155 - DNA, 30 bp, Artificial Sequence
  Description of Artificial Sequence: Synthetic casein; inner sequence
gacgtgacgtgacggatggtgacgtacgca

SEQ ID NO: 48156 - DNA, 30 bp, Artificial Sequence; identical to SEQ ID NO: 28400
  Description of Artificial Sequence: Synthetic casein; inner sequence

SEQ ID NO: 48157 - DNA, 30 bp, Artificial Sequence; identical to SEQ ID NO: 44116
  Description of Artificial Sequence: Synthetic casein; inner sequence

SEQ ID NO: 48158 - DNA, 30 bp, Artificial Sequence; identical to SEQ ID NO: 28335
  Description of Artificial Sequence: Synthetic casein; inner sequence

SEQ ID NO: 48159 - DNA, 30 bp, Artificial Sequence; identical to SEQ ID NO: 303
  Description of Artificial Sequence: Synthetic casein; inner sequence

SEQ ID NO: 48160 - DNA, 30 bp, Artificial Sequence; identical to SEQ ID NO: 73
  Description of Artificial Sequence: Synthetic casein; inner sequence

SEQ ID NO: 48161 - DNA, 30 bp, Artificial Sequence; identical to SEQ ID NO: 44678
  Description of Artificial Sequence: Synthetic casein; inner sequence

SEQ ID NO: 48162 - DNA, 30 bp, Artificial Sequence; identical to SEQ ID NO: 28869
  Description of Artificial Sequence: Synthetic casein; inner sequence

SEQ ID NO: 48163 - DNA, 30 bp, Artificial Sequence; identical to SEQ ID NO: 272
  Description of Artificial Sequence: Synthetic casein; inner sequence

SEQ ID NO: 48164 - DNA, 30 bp, Artificial Sequence; identical to SEQ ID NO: 28471
  Description of Artificial Sequence: Synthetic casein; inner sequence

SEQ ID NO: 48165 - DNA, 30 bp, Artificial Sequence; identical to SEQ ID NO: 44127
  Description of Artificial Sequence: Synthetic casein; inner sequence

SEQ ID NO: 48166 - DNA, 30 bp, Artificial Sequence; identical to SEQ ID NO: 28720
  Description of Artificial Sequence: Synthetic casein; inner sequence

SEQ ID NO: 48167 - DNA, 30 bp, Artificial Sequence; identical to SEQ ID NO: 4707
  Description of Artificial Sequence: Synthetic casein; inner sequence

SEQ ID NO: 48168 - DNA, 30 bp, Artificial Sequence; identical to SEQ ID NO: 4521
  Description of Artificial Sequence: Synthetic casein; inner sequence

SEQ ID NO: 48169 - DNA, 30 bp, Artificial Sequence; identical to SEQ ID NO: 4336
  Description of Artificial Sequence: Synthetic casein; inner sequence

SEQ ID NO: 48170 - DNA, 30 bp, Artificial Sequence; identical to SEQ ID NO: 28682
  Description of Artificial Sequence: Synthetic casein; inner sequence

SEQ ID NO: 48171 - DNA, 30 bp, Artificial Sequence; identical to SEQ ID NO: 161
  Description of Artificial Sequence: Synthetic casein; inner sequence

SEQ ID NO: 48172 - DNA, 30 bp, Artificial Sequence; identical to SEQ ID NO: 457
  Description of Artificial Sequence: Synthetic casein; inner sequence

SEQ ID NO: 48173 - DNA, 30 bp, Artificial Sequence; identical to SEQ ID NO: 20869
  Description of Artificial Sequence: Synthetic casein; inner sequence

SEQ ID NO: 48174 - DNA, 30 bp, Artificial Sequence; identical to SEQ ID NO: 28760
  Description of Artificial Sequence: Synthetic casein; inner sequence

SEQ ID NO: 48175 - DNA, 30 bp, Artificial Sequence; identical to SEQ ID NO: 28971
  Description of Artificial Sequence: Synthetic casein; inner sequence

SEQ ID NO: 48176 - DNA, 30 bp, Artificial Sequence; identical to SEQ ID NO: 44140
  Description of Artificial Sequence: Synthetic casein; inner sequence

SEQ ID NO: 48177 - DNA, 30 bp, Artificial Sequence; identical to SEQ ID NO: 22
  Description of Artificial Sequence: Synthetic casein; inner sequence

SEQ ID NO: 48178 - DNA, 30 bp, Artificial Sequence; identical to SEQ ID NO: 28995
  Description of Artificial Sequence: Synthetic casein; inner sequence

SEQ ID NO: 48179 - DNA, 31 bp, Artificial Sequence; identical to SEQ ID NO: 44761
  Description of Artificial Sequence: Synthetic casein; inner sequence

SEQ ID NO: 48180 - DNA, 30 bp, Artificial Sequence; identical to SEQ ID NO: 828
  Description of Artificial Sequence: Synthetic casein; inner sequence

SEQ ID NO: 48181 - DNA, 30 bp, Artificial Sequence; identical to SEQ ID NO: 20551
  Description of Artificial Sequence: Synthetic casein; inner sequence

SEQ ID NO: 48182 - DNA, 30 bp, Artificial Sequence; identical to SEQ ID NO: 28839
  Description of Artificial Sequence: Synthetic casein; inner sequence

SEQ ID NO: 48183 - DNA, 30 bp, Artificial Sequence; identical to SEQ ID NO: 617
  Description of Artificial Sequence: Synthetic casein; inner sequence

SEQ ID NO: 48184 - DNA, 30 bp, Artificial Sequence; identical to SEQ ID NO: 44318
  Description of Artificial Sequence: Synthetic casein; inner sequence

SEQ ID NO: 48185 - DNA, 30 bp, Artificial Sequence; identical to SEQ ID NO: 20504
  Description of Artificial Sequence: Synthetic casein; inner sequence

SEQ ID NO: 48186 - DNA, 30 bp, Artificial Sequence; identical to SEQ ID NO: 267
  Description of Artificial Sequence: Synthetic casein; inner sequence

SEQ ID NO: 48187 - DNA, 30 bp, Artificial Sequence; identical to SEQ ID NO: 727
  Description of Artificial Sequence: Synthetic casein; inner sequence

SEQ ID NO: 48188 - DNA, 30 bp, Artificial Sequence; identical to SEQ ID NO: 44112
  Description of Artificial Sequence: Synthetic casein; inner sequence

SEQ ID NO: 48189 - DNA, 30 bp, Artificial Sequence; identical to SEQ ID NO: 44227
  Description of Artificial Sequence: Synthetic casein; inner sequence

SEQ ID NO: 48190 - DNA, 30 bp, Artificial Sequence; identical to SEQ ID NO: 44542
  Description of Artificial Sequence: Synthetic casein; inner sequence

SEQ ID NO: 48191 - DNA, 25 bp, Artificial Sequence
  Description of Artificial Sequence: Synthetic casein; inner sequence
cgcaccgtcaagcaggcacgtgtca

SEQ ID NO: 48192 - DNA, 30 bp, Artificial Sequence; identical to SEQ ID NO: 44297
  Description of Artificial Sequence: Synthetic casein; inner sequence

SEQ ID NO: 48193 - DNA, 30 bp, Artificial Sequence; identical to SEQ ID NO: 28557
  Description of Artificial Sequence: Synthetic casein; inner sequence

SEQ ID NO: 48194 - DNA, 30 bp, Artificial Sequence; identical to SEQ ID NO: 16531
  Description of Artificial Sequence: Synthetic casein; inner sequence

SEQ ID NO: 48195 - DNA, 30 bp, Artificial Sequence; identical to SEQ ID NO: 77
  Description of Artificial Sequence: Synthetic casein; inner sequence

SEQ ID NO: 48196 - DNA, 30 bp, Artificial Sequence; identical to SEQ ID NO: 28874
  Description of Artificial Sequence: Synthetic casein; inner sequence

SEQ ID NO: 48197 - DNA, 30 bp, Artificial Sequence; identical to SEQ ID NO: 4571
  Description of Artificial Sequence: Synthetic casein; inner sequence

SEQ ID NO: 48198 - DNA, 30 bp, Artificial Sequence
  Description of Artificial Sequence: Synthetic casein; inner sequence
cgtacggaacggcacgtcctgtcctacgca

SEQ ID NO: 48199 - DNA, 30 bp, Artificial Sequence; identical to SEQ ID NO: 20984
  Description of Artificial Sequence: Synthetic casein; inner sequence

SEQ ID NO: 48200 - DNA, 30 bp, Artificial Sequence; identical to SEQ ID NO: 16
  Description of Artificial Sequence: Synthetic casein; inner sequence

SEQ ID NO: 48201 - DNA, 30 bp, Artificial Sequence; identical to SEQ ID NO: 40829
  Description of Artificial Sequence: Synthetic casein; inner sequence

SEQ ID NO: 48202 - DNA, 30 bp, Artificial Sequence; identical to SEQ ID NO: 16399
  Description of Artificial Sequence: Synthetic casein; inner sequence

SEQ ID NO: 48203 - DNA, 30 bp, Artificial Sequence; identical to SEQ ID NO: 44777
  Description of Artificial Sequence: Synthetic casein; inner sequence

SEQ ID NO: 48204 - DNA, 30 bp, Artificial Sequence; identical to SEQ ID NO: 44159
  Description of Artificial Sequence: Synthetic casein; inner sequence

SEQ ID NO: 48205 - DNA, 30 bp, Artificial Sequence; identical to SEQ ID NO: 20518
  Description of Artificial Sequence: Synthetic casein; inner sequence

SEQ ID NO: 48206 - DNA, 30 bp, Artificial Sequence; identical to SEQ ID NO: 632
  Description of Artificial Sequence: Synthetic casein; inner sequence

SEQ ID NO: 48207 - DNA, 29 bp, Artificial Sequence
  Description of Artificial Sequence: Synthetic casein; inner sequence
cgacgtgtcgcagtacgtaccgttgcgca

SEQ ID NO: 48208 - DNA, 30 bp, Artificial Sequence; identical to SEQ ID NO: 454
  Description of Artificial Sequence: Synthetic casein; inner sequence

SEQ ID NO: 48209 - DNA, 30 bp, Artificial Sequence; identical to SEQ ID NO: 44166
  Description of Artificial Sequence: Synthetic casein; inner sequence

SEQ ID NO: 48210 - DNA, 30 bp, Artificial Sequence; identical to SEQ ID NO: 51
  Description of Artificial Sequence: Synthetic casein; inner sequence

SEQ ID NO: 48211 - DNA, 30 bp, Artificial Sequence; identical to SEQ ID NO: 228
  Description of Artificial Sequence: Synthetic casein; inner sequence

SEQ ID NO: 48212 - DNA, 30 bp, Artificial Sequence; identical to SEQ ID NO: 4489
  Description of Artificial Sequence: Synthetic casein; inner sequence

SEQ ID NO: 48213 - DNA, 30 bp, Artificial Sequence; identical to SEQ ID NO: 232
  Description of Artificial Sequence: Synthetic casein; inner sequence

SEQ ID NO: 48214 - DNA, 30 bp, Artificial Sequence; identical to SEQ ID NO: 44493
  Description of Artificial Sequence: Synthetic casein; inner sequence

SEQ ID NO: 48215 - DNA, 30 bp, Artificial Sequence; identical to SEQ ID NO: 44191
  Description of Artificial Sequence: Synthetic casein; inner sequence

SEQ ID NO: 48216 - DNA, 30 bp, Artificial Sequence; identical to SEQ ID NO: 28582
  Description of Artificial Sequence: Synthetic casein; inner sequence

SEQ ID NO: 48217 - DNA, 30 bp, Artificial Sequence; identical to SEQ ID NO: 352
  Description of Artificial Sequence: Synthetic casein; inner sequence

SEQ ID NO: 48218 - DNA, 30 bp, Artificial Sequence; identical to SEQ ID NO: 619
  Description of Artificial Sequence: Synthetic casein; inner sequence

SEQ ID NO: 48219 - DNA, 30 bp, Artificial Sequence; identical to SEQ ID NO: 28735
  Description of Artificial Sequence: Synthetic casein; inner sequence

SEQ ID NO: 48220 - DNA, 30 bp, Artificial Sequence; identical to SEQ ID NO: 20737
  Description of Artificial Sequence: Synthetic casein; inner sequence

SEQ ID NO: 48221 - DNA, 30 bp, Artificial Sequence
  Description of Artificial Sequence: Synthetic casein; inner sequence
gtcacgtcgtcacgcagcatgtacggcaca

SEQ ID NO: 48222 - DNA, 30 bp, Artificial Sequence; identical to SEQ ID NO: 151
  Description of Artificial Sequence: Synthetic casein; inner sequence

SEQ ID NO: 48223 - DNA, 30 bp, Artificial Sequence; identical to SEQ ID NO: 4940
  Description of Artificial Sequence: Synthetic casein; inner sequence

SEQ ID NO: 48224 - DNA, 30 bp, Artificial Sequence; identical to SEQ ID NO: 20889
  Description of Artificial Sequence: Synthetic casein; inner sequence

SEQ ID NO: 48225 - DNA, 30 bp, Artificial Sequence; identical to SEQ ID NO: 28432
  Description of Artificial Sequence: Synthetic casein; inner sequence

SEQ ID NO: 48226 - DNA, 30 bp, Artificial Sequence; identical to SEQ ID NO: 320
  Description of Artificial Sequence: Synthetic casein; inner sequence

SEQ ID NO: 48227 - DNA, 30 bp, Artificial Sequence; identical to SEQ ID NO: 891
  Description of Artificial Sequence: Synthetic casein; inner sequence

SEQ ID NO: 48228 - DNA, 30 bp, Artificial Sequence; identical to SEQ ID NO: 44345
  Description of Artificial Sequence: Synthetic casein; inner sequence

SEQ ID NO: 48229 - DNA, 30 bp, Artificial Sequence; identical to SEQ ID NO: 149
  Description of Artificial Sequence: Synthetic casein; inner sequence

SEQ ID NO: 48230 - DNA, 30 bp, Artificial Sequence; identical to SEQ ID NO: 20519
  Description of Artificial Sequence: Synthetic casein; inner sequence

SEQ ID NO: 48231 - DNA, 30 bp, Artificial Sequence; identical to SEQ ID NO: 227
  Description of Artificial Sequence: Synthetic casein; inner sequence

SEQ ID NO: 48232 - DNA, 30 bp, Artificial Sequence; identical to SEQ ID NO: 44461
  Description of Artificial Sequence: Synthetic casein; inner sequence

SEQ ID NO: 48233 - DNA, 30 bp, Artificial Sequence; identical to SEQ ID NO: 192
  Description of Artificial Sequence: Synthetic casein; inner sequence

SEQ ID NO: 48234 - DNA, 30 bp, Artificial Sequence; identical to SEQ ID NO: 44182
  Description of Artificial Sequence: Synthetic casein; inner sequence

SEQ ID NO: 48235 - DNA, 30 bp, Artificial Sequence; identical to SEQ ID NO: 20324
  Description of Artificial Sequence: Synthetic casein; inner sequence

SEQ ID NO: 48236 - DNA, 30 bp, Artificial Sequence; identical to SEQ ID NO: 131
  Description of Artificial Sequence: Synthetic casein; inner sequence

SEQ ID NO: 48237 - DNA, 30 bp, Artificial Sequence; identical to SEQ ID NO: 321
  Description of Artificial Sequence: Synthetic casein; inner sequence

SEQ ID NO: 48238 - DNA, 29 bp, Artificial Sequence
  Description of Artificial Sequence: Synthetic casein; inner sequence
ggacgcaacgtacgtacttgacgtgtgca

SEQ ID NO: 48239 - DNA, 30 bp, Artificial Sequence; identical to SEQ ID NO: 28315
  Description of Artificial Sequence: Synthetic casein; inner sequence

SEQ ID NO: 48240 - DNA, 30 bp, Artificial Sequence; identical to SEQ ID NO: 8910
  Description of Artificial Sequence: Synthetic casein; inner sequence

SEQ ID NO: 48241 - DNA, 30 bp, Artificial Sequence; identical to SEQ ID NO: 190
  Description of Artificial Sequence: Synthetic casein; inner sequence

SEQ ID NO: 48242 - DNA, 30 bp, Artificial Sequence; identical to SEQ ID NO: 207
  Description of Artificial Sequence: Synthetic casein; inner sequence

SEQ ID NO: 48243 - DNA, 30 bp, Artificial Sequence; identical to SEQ ID NO: 44722
  Description of Artificial Sequence: Synthetic casein; inner sequence

SEQ ID NO: 48244 - DNA, 30 bp, Artificial Sequence; identical to SEQ ID NO: 16978
  Description of Artificial Sequence: Synthetic casein; inner sequence

SEQ ID NO: 48245 - DNA, 30 bp, Artificial Sequence; identical to SEQ ID NO: 28173
  Description of Artificial Sequence: Synthetic casein; inner sequence

SEQ ID NO: 48246 - DNA, 30 bp, Artificial Sequence
  Description of Artificial Sequence: Synthetic casein; inner sequence
gatgcgtcacgtaaccgtccttgcgtcacg

SEQ ID NO: 48247 - DNA, 30 bp, Artificial Sequence
  Description of Artificial Sequence: Synthetic casein; inner sequence
gcgtcacgatgcgacggtatggactgcgtg

SEQ ID NO: 48248 - DNA, 30 bp, Artificial Sequence; identical to SEQ ID NO: 20302
  Description of Artificial Sequence: Synthetic casein; inner sequence

SEQ ID NO: 48249 - DNA, 30 bp, Artificial Sequence; identical to SEQ ID NO: 644
  Description of Artificial Sequence: Synthetic casein; inner sequence

SEQ ID NO: 48250 - DNA, 30 bp, Artificial Sequence
  Description of Artificial Sequence: Synthetic casein; inner sequence
gcacgatacgtacctgctatgtacgtcacg

SEQ ID NO: 48251 - DNA, 30 bp, Artificial Sequence; identical to SEQ ID NO: 16861
  Description of Artificial Sequence: Synthetic casein; inner sequence

SEQ ID NO: 48252 - DNA, 30 bp, Artificial Sequence; identical to SEQ ID NO: 28688
  Description of Artificial Sequence: Synthetic casein; inner sequence

SEQ ID NO: 48253 - DNA, 30 bp, Artificial Sequence; identical to SEQ ID NO: 728
  Description of Artificial Sequence: Synthetic casein; inner sequence

SEQ ID NO: 48254 - DNA, 30 bp, Artificial Sequence; identical to SEQ ID NO: 28555
  Description of Artificial Sequence: Synthetic casein; inner sequence

SEQ ID NO: 48255 - DNA, 30 bp, Artificial Sequence; identical to SEQ ID NO: 274
  Description of Artificial Sequence: Synthetic casein; inner sequence

SEQ ID NO: 48256 - DNA, 30 bp, Artificial Sequence; identical to SEQ ID NO: 28960
  Description of Artificial Sequence: Synthetic casein; inner sequence

SEQ ID NO: 48257 - DNA, 30 bp, Artificial Sequence; identical to SEQ ID NO: 44582
  Description of Artificial Sequence: Synthetic casein; inner sequence

SEQ ID NO: 48258 - DNA, 30 bp, Artificial Sequence; identical to SEQ ID NO: 16513
  Description of Artificial Sequence: Synthetic casein; inner sequence

SEQ ID NO: 48259 - DNA, 30 bp, Artificial Sequence; identical to SEQ ID NO: 372
  Description of Artificial Sequence: Synthetic casein; inner sequence

SEQ ID NO: 48260 - DNA, 30 bp, Artificial Sequence; identical to SEQ ID NO: 256
  Description of Artificial Sequence: Synthetic casein; inner sequence

SEQ ID NO: 48261 - DNA, 30 bp, Artificial Sequence; identical to SEQ ID NO: 204
  Description of Artificial Sequence: Synthetic casein; inner sequence

SEQ ID NO: 48262 - DNA, 30 bp, Artificial Sequence; identical to SEQ ID NO: 44237
  Description of Artificial Sequence: Synthetic casein; inner sequence

SEQ ID NO: 48263 - DNA, 30 bp, Artificial Sequence; identical to SEQ ID NO: 28978
  Description of Artificial Sequence: Synthetic casein; inner sequence

SEQ ID NO: 48264 - DNA, 30 bp, Artificial Sequence; identical to SEQ ID NO: 249
  Description of Artificial Sequence: Synthetic casein; inner sequence

SEQ ID NO: 48265 - DNA, 30 bp, Artificial Sequence; identical to SEQ ID NO: 28924
  Description of Artificial Sequence: Synthetic casein; inner sequence

SEQ ID NO: 48266 - DNA, 30 bp, Artificial Sequence; identical to SEQ ID NO: 44348
  Description of Artificial Sequence: Synthetic casein; inner sequence

SEQ ID NO: 48267 - DNA, 30 bp, Artificial Sequence; identical to SEQ ID NO: 28158
  Description of Artificial Sequence: Synthetic casein; inner sequence

SEQ ID NO: 48268 - DNA, 30 bp, Artificial Sequence; identical to SEQ ID NO: 115
  Description of Artificial Sequence: Synthetic casein; inner sequence

SEQ ID NO: 48269 - DNA, 30 bp, Artificial Sequence; identical to SEQ ID NO: 397
  Description of Artificial Sequence: Synthetic casein; inner sequence

SEQ ID NO: 48270 - DNA, 30 bp, Artificial Sequence; identical to SEQ ID NO: 20560
  Description of Artificial Sequence: Synthetic casein; inner sequence

SEQ ID NO: 48271 - DNA, 26 bp, Artificial Sequence
  Description of Artificial Sequence: Synthetic casein; inner sequence
ggcatgcacgcacctacacgtggaca

SEQ ID NO: 48272 - DNA, 30 bp, Artificial Sequence; identical to SEQ ID NO: 28808
  Description of Artificial Sequence: Synthetic casein; inner sequence

SEQ ID NO: 48273 - DNA, 30 bp, Artificial Sequence; identical to SEQ ID NO: 44698
  Description of Artificial Sequence: Synthetic casein; inner sequence

SEQ ID NO: 48274 - DNA, 28 bp, Artificial Sequence
  Description of Artificial Sequence: Synthetic casein; inner sequence
ggcatgcacgcacctacacgtgatcatg

SEQ ID NO: 48275 - DNA, 30 bp, Artificial Sequence; identical to SEQ ID NO: 28693
  Description of Artificial Sequence: Synthetic casein; inner sequence

SEQ ID NO: 48276 - DNA, 30 bp, Artificial Sequence; identical to SEQ ID NO: 28996
  Description of Artificial Sequence: Synthetic casein; inner sequence

SEQ ID NO: 48277 - DNA, 30 bp, Artificial Sequence; identical to SEQ ID NO: 28416
  Description of Artificial Sequence: Synthetic casein; inner sequence

SEQ ID NO: 48278 - DNA, 30 bp, Artificial Sequence; identical to SEQ ID NO: 20836
  Description of Artificial Sequence: Synthetic casein; inner sequence

SEQ ID NO: 48279 - DNA, 30 bp, Artificial Sequence; identical to SEQ ID NO: 31
  Description of Artificial Sequence: Synthetic casein; inner sequence

SEQ ID NO: 48280 - DNA, 29 bp, Artificial Sequence
  Description of Artificial Sequence: Synthetic casein; inner sequence
gtcattccgcatcctacacgtggtgcatg

SEQ ID NO: 48281 - DNA, 30 bp, Artificial Sequence; identical to SEQ ID NO: 16819
  Description of Artificial Sequence: Synthetic casein; inner sequence

SEQ ID NO: 48282 - DNA, 30 bp, Artificial Sequence; identical to SEQ ID NO: 28959
  Description of Artificial Sequence: Synthetic casein; inner sequence

SEQ ID NO: 48283 - DNA, 30 bp, Artificial Sequence; identical to SEQ ID NO: 177
  Description of Artificial Sequence: Synthetic casein; inner sequence

SEQ ID NO: 48284 - DNA, 30 bp, Artificial Sequence; identical to SEQ ID NO: 28934
  Description of Artificial Sequence: Synthetic casein; inner sequence

SEQ ID NO: 48285 - DNA, 30 bp, Artificial Sequence; identical to SEQ ID NO: 44479
  Description of Artificial Sequence: Synthetic casein; inner sequence

SEQ ID NO: 48286 - DNA, 30 bp, Artificial Sequence; identical to SEQ ID NO: 776
  Description of Artificial Sequence: Synthetic casein; inner sequence

SEQ ID NO: 48287 - DNA, 30 bp, Artificial Sequence; identical to SEQ ID NO: 28793
  Description of Artificial Sequence: Synthetic casein; inner sequence

SEQ ID NO: 48288 - DNA, 30 bp, Artificial Sequence; identical to SEQ ID NO: 44490
  Description of Artificial Sequence: Synthetic casein; inner sequence

SEQ ID NO: 48289 - DNA, 30 bp, Artificial Sequence; identical to SEQ ID NO: 28754
  Description of Artificial Sequence: Synthetic casein; inner sequence

SEQ ID NO: 48290 - DNA, 30 bp, Artificial Sequence; identical to SEQ ID NO: 884
  Description of Artificial Sequence: Synthetic casein; inner sequence

SEQ ID NO: 48291 - DNA, 30 bp, Artificial Sequence; identical to SEQ ID NO: 114
  Description of Artificial Sequence: Synthetic casein; inner sequence

SEQ ID NO: 48292 - DNA, 30 bp, Artificial Sequence
  Description of Artificial Sequence: Synthetic casein; inner sequence
gcgtcacgccacatgtacgtatgcgtcacg

SEQ ID NO: 48293 - DNA, 30 bp, Artificial Sequence; identical to SEQ ID NO: 44819
  Description of Artificial Sequence: Synthetic casein; inner sequence

SEQ ID NO: 48294 - DNA, 30 bp, Artificial Sequence; identical to SEQ ID NO: 909
  Description of Artificial Sequence: Synthetic casein; inner sequence

SEQ ID NO: 48295 - DNA, 30 bp, Artificial Sequence; identical to SEQ ID NO: 591
  Description of Artificial Sequence: Synthetic casein; inner sequence

SEQ ID NO: 48296 - DNA, 30 bp, Artificial Sequence; identical to SEQ ID NO: 955
  Description of Artificial Sequence: Synthetic casein; inner sequence

SEQ ID NO: 48297 - DNA, 30 bp, Artificial Sequence; identical to SEQ ID NO: 44344
  Description of Artificial Sequence: Synthetic casein; inner sequence

SEQ ID NO: 48298 - DNA, 30 bp, Artificial Sequence; identical to SEQ ID NO: 16703
  Description of Artificial Sequence: Synthetic casein; inner sequence

SEQ ID NO: 48299 - DNA, 30 bp, Artificial Sequence; identical to SEQ ID NO: 44744
  Description of Artificial Sequence: Synthetic casein; inner sequence

SEQ ID NO: 48300 - DNA, 30 bp, Artificial Sequence; identical to SEQ ID NO: 44439
  Description of Artificial Sequence: Synthetic casein; inner sequence

SEQ ID NO: 48301 - DNA, 30 bp, Artificial Sequence; identical to SEQ ID NO: 4743
  Description of Artificial Sequence: Synthetic casein; inner sequence

SEQ ID NO: 48302 - DNA, 30 bp, Artificial Sequence; identical to SEQ ID NO: 358
  Description of Artificial Sequence: Synthetic casein; inner sequence

SEQ ID NO: 48303 - DNA, 30 bp, Artificial Sequence; identical to SEQ ID NO: 28603
  Description of Artificial Sequence: Synthetic casein; inner sequence

SEQ ID NO: 48304 - DNA, 30 bp, Artificial Sequence; identical to SEQ ID NO: 901
  Description of Artificial Sequence: Synthetic casein; inner sequence

SEQ ID NO: 48305 - DNA, 30 bp, Artificial Sequence; identical to SEQ ID NO: 4620
  Description of Artificial Sequence: Synthetic casein; inner sequence

SEQ ID NO: 48306 - DNA, 26 bp, Artificial Sequence
  Description of Artificial Sequence: Synthetic casein; inner sequence
ggacgcaacgtaccgccgtggccatg

SEQ ID NO: 48307 - DNA, 30 bp, Artificial Sequence; identical to SEQ ID NO: 144
  Description of Artificial Sequence: Synthetic casein; inner sequence

SEQ ID NO: 48308 - DNA, 30 bp, Artificial Sequence; identical to SEQ ID NO: 44614
  Description of Artificial Sequence: Synthetic casein; inner sequence

SEQ ID NO: 48309 - DNA, 30 bp, Artificial Sequence; identical to SEQ ID NO: 351
  Description of Artificial Sequence: Synthetic casein; inner sequence

SEQ ID NO: 48310 - DNA, 30 bp, Artificial Sequence; identical to SEQ ID NO: 137
  Description of Artificial Sequence: Synthetic casein; inner sequence

SEQ ID NO: 48311 - DNA, 30 bp, Artificial Sequence; identical to SEQ ID NO: 823
  Description of Artificial Sequence: Synthetic casein; inner sequence

SEQ ID NO: 48312 - DNA, 30 bp, Artificial Sequence; identical to SEQ ID NO: 28744
  Description of Artificial Sequence: Synthetic casein; inner sequence

SEQ ID NO: 48313 - DNA, 30 bp, Artificial Sequence; identical to SEQ ID NO: 24984
  Description of Artificial Sequence: Synthetic casein; inner sequence

SEQ ID NO: 48314 - DNA, 30 bp, Artificial Sequence; identical to SEQ ID NO: 615
  Description of Artificial Sequence: Synthetic casein; inner sequence

SEQ ID NO: 48315 - DNA, 30 bp, Artificial Sequence; identical to SEQ ID NO: 44251
  Description of Artificial Sequence: Synthetic casein; inner sequence

SEQ ID NO: 48316 - DNA, 30 bp, Artificial Sequence; identical to SEQ ID NO: 28516
  Description of Artificial Sequence: Synthetic casein; inner sequence

SEQ ID NO: 48317 - DNA, 30 bp, Artificial Sequence; identical to SEQ ID NO: 20478
  Description of Artificial Sequence: Synthetic casein; inner sequence

SEQ ID NO: 48318 - DNA, 30 bp, Artificial Sequence; identical to SEQ ID NO: 28591
  Description of Artificial Sequence: Synthetic casein; inner sequence

SEQ ID NO: 48319 - DNA, 30 bp, Artificial Sequence; identical to SEQ ID NO: 20466
  Description of Artificial Sequence: Synthetic casein; inner sequence

SEQ ID NO: 48320 - DNA, 30 bp, Artificial Sequence; identical to SEQ ID NO: 60
  Description of Artificial Sequence: Synthetic casein; inner sequence

SEQ ID NO: 48321 - DNA, 30 bp, Artificial Sequence; identical to SEQ ID NO: 289
  Description of Artificial Sequence: Synthetic casein; inner sequence

SEQ ID NO: 48322 - DNA, 30 bp, Artificial Sequence
  Description of Artificial Sequence: Synthetic casein; inner sequence
cgttgcgcacgcacgtcatgtggatgcacg

SEQ ID NO: 48323 - DNA, 30 bp, Artificial Sequence; identical to SEQ ID NO: 20769
  Description of Artificial Sequence: Synthetic casein; inner sequence

SEQ ID NO: 48324 - DNA, 30 bp, Artificial Sequence; identical to SEQ ID NO: 38
  Description of Artificial Sequence: Synthetic casein; inner sequence

SEQ ID NO: 48325 - DNA, 30 bp, Artificial Sequence; identical to SEQ ID NO: 4938
  Description of Artificial Sequence: Synthetic casein; inner sequence

SEQ ID NO: 48326 - DNA, 30 bp, Artificial Sequence; identical to SEQ ID NO: 225
  Description of Artificial Sequence: Synthetic casein; inner sequence

SEQ ID NO: 48327 - DNA, 30 bp, Artificial Sequence; identical to SEQ ID NO: 244
  Description of Artificial Sequence: Synthetic casein; inner sequence

SEQ ID NO: 48328 - DNA, 30 bp, Artificial Sequence; identical to SEQ ID NO: 4960
  Description of Artificial Sequence: Synthetic casein; inner sequence

SEQ ID NO: 48329 - DNA, 30 bp, Artificial Sequence; identical to SEQ ID NO: 20811
  Description of Artificial Sequence: Synthetic casein; inner sequence

SEQ ID NO: 48330 - DNA, 30 bp, Artificial Sequence; identical to SEQ ID NO: 16948
  Description of Artificial Sequence: Synthetic casein; inner sequence

SEQ ID NO: 48331 - DNA, 30 bp, Artificial Sequence; identical to SEQ ID NO: 44472
  Description of Artificial Sequence: Synthetic casein; inner sequence

SEQ ID NO: 48332 - DNA, 30 bp, Artificial Sequence; identical to SEQ ID NO: 367
  Description of Artificial Sequence: Synthetic casein; inner sequence

SEQ ID NO: 48333 - DNA, 30 bp, Artificial Sequence; identical to SEQ ID NO: 28114
  Description of Artificial Sequence: Synthetic casein; inner sequence

SEQ ID NO: 48334 - DNA, 30 bp, Artificial Sequence; identical to SEQ ID NO: 141
  Description of Artificial Sequence: Synthetic casein; inner sequence

SEQ ID NO: 48335 - DNA, 30 bp, Artificial Sequence; identical to SEQ ID NO: 28747
  Description of Artificial Sequence: Synthetic casein; inner sequence

SEQ ID NO: 48336 - DNA, 30 bp, Artificial Sequence; identical to SEQ ID NO: 16585
  Description of Artificial Sequence: Synthetic casein; inner sequence

SEQ ID NO: 48337 - DNA, 30 bp, Artificial Sequence; identical to SEQ ID NO: 706
  Description of Artificial Sequence: Synthetic casein; inner sequence

SEQ ID NO: 48338 - DNA, 30 bp, Artificial Sequence; identical to SEQ ID NO: 780
  Description of Artificial Sequence: Synthetic casein; inner sequence

SEQ ID NO: 48339 - DNA, 30 bp, Artificial Sequence; identical to SEQ ID NO: 44293
  Description of Artificial Sequence: Synthetic casein; inner sequence

SEQ ID NO: 48340 - DNA, 30 bp, Artificial Sequence; identical to SEQ ID NO: 117
  Description of Artificial Sequence: Synthetic casein; inner sequence

SEQ ID NO: 48341 - DNA, 30 bp, Artificial Sequence; identical to SEQ ID NO: 344
  Description of Artificial Sequence: Synthetic casein; inner sequence

SEQ ID NO: 48342 - DNA, 30 bp, Artificial Sequence; identical to SEQ ID NO: 860
  Description of Artificial Sequence: Synthetic casein; inner sequence

SEQ ID NO: 48343 - DNA, 30 bp, Artificial Sequence; identical to SEQ ID NO: 28389
  Description of Artificial Sequence: Synthetic casein; inner sequence

SEQ ID NO: 48344 - DNA, 30 bp, Artificial Sequence; identical to SEQ ID NO: 4638
  Description of Artificial Sequence: Synthetic casein; inner sequence

SEQ ID NO: 48345 - DNA, 30 bp, Artificial Sequence; identical to SEQ ID NO: 290
  Description of Artificial Sequence: Synthetic casein; inner sequence

SEQ ID NO: 48346 - DNA, 30 bp, Artificial Sequence; identical to SEQ ID NO: 74
  Description of Artificial Sequence: Synthetic casein; inner sequence

SEQ ID NO: 48347 - DNA, 30 bp, Artificial Sequence; identical to SEQ ID NO: 20613
  Description of Artificial Sequence: Synthetic casein; inner sequence

SEQ ID NO: 48348 - DNA, 30 bp, Artificial Sequence; identical to SEQ ID NO: 877
  Description of Artificial Sequence: Synthetic casein; inner sequence

SEQ ID NO: 48349 - DNA, 30 bp, Artificial Sequence; identical to SEQ ID NO: 246
  Description of Artificial Sequence: Synthetic casein; inner sequence

SEQ ID NO: 48350 - DNA, 30 bp, Artificial Sequence; identical to SEQ ID NO: 20730
  Description of Artificial Sequence: Synthetic casein; inner sequence

SEQ ID NO: 48351 - DNA, 30 bp, Artificial Sequence
  Description of Artificial Sequence: Synthetic casein; inner sequence
acgtgcgtacgcgtcgtgacgtactgcgtg

SEQ ID NO: 48352 - DNA, 30 bp, Artificial Sequence; identical to SEQ ID NO: 248
  Description of Artificial Sequence: Synthetic casein; inner sequence

SEQ ID NO: 48353 - DNA, 30 bp, Artificial Sequence; identical to SEQ ID NO: 28780
  Description of Artificial Sequence: Synthetic casein; inner sequence

SEQ ID NO: 48354 - DNA, 30 bp, Artificial Sequence; identical to SEQ ID NO: 16906
  Description of Artificial Sequence: Synthetic casein; inner sequence

SEQ ID NO: 48355 - DNA, 30 bp, Artificial Sequence; identical to SEQ ID NO: 28909
  Description of Artificial Sequence: Synthetic casein; inner sequence

SEQ ID NO: 48356 - DNA, 30 bp, Artificial Sequence; identical to SEQ ID NO: 44256
  Description of Artificial Sequence: Synthetic casein; inner sequence

SEQ ID NO: 48357 - DNA, 30 bp, Artificial Sequence; identical to SEQ ID NO: 44314
  Description of Artificial Sequence: Synthetic casein; inner sequence

SEQ ID NO: 48358 - DNA, 30 bp, Artificial Sequence; identical to SEQ ID NO: 16504
  Description of Artificial Sequence: Synthetic casein; inner sequence

SEQ ID NO: 48359 - DNA, 30 bp, Artificial Sequence; identical to SEQ ID NO: 8946
  Description of Artificial Sequence: Synthetic casein; inner sequence

SEQ ID NO: 48360 - DNA, 30 bp, Artificial Sequence; identical to SEQ ID NO: 44214
  Description of Artificial Sequence: Synthetic casein; inner sequence

SEQ ID NO: 48361 - DNA, 30 bp, Artificial Sequence; identical to SEQ ID NO: 169
  Description of Artificial Sequence: Synthetic casein; inner sequence

SEQ ID NO: 48362 - DNA, 30 bp, Artificial Sequence; identical to SEQ ID NO: 44189
  Description of Artificial Sequence: Synthetic casein; inner sequence

SEQ ID NO: 48363 - DNA, 30 bp, Artificial Sequence; identical to SEQ ID NO: 8810
  Description of Artificial Sequence: Synthetic casein; inner sequence

SEQ ID NO: 48364 - DNA, 30 bp, Artificial Sequence; identical to SEQ ID NO: 44741
  Description of Artificial Sequence: Synthetic casein; inner sequence

SEQ ID NO: 48365 - DNA, 30 bp, Artificial Sequence; identical to SEQ ID NO: 28957
  Description of Artificial Sequence: Synthetic casein; inner sequence

SEQ ID NO: 48366 - DNA, 30 bp, Artificial Sequence; identical to SEQ ID NO: 16342
  Description of Artificial Sequence: Synthetic casein; inner sequence

SEQ ID NO: 48367 - DNA, 30 bp, Artificial Sequence; identical to SEQ ID NO: 44983
  Description of Artificial Sequence: Synthetic casein; inner sequence

SEQ ID NO: 48368 - DNA, 30 bp, Artificial Sequence; identical to SEQ ID NO: 326
  Description of Artificial Sequence: Synthetic casein; inner sequence

SEQ ID NO: 48369 - DNA, 30 bp, Artificial Sequence; identical to SEQ ID NO: 28993
  Description of Artificial Sequence: Synthetic casein; inner sequence

SEQ ID NO: 48370 - DNA, 30 bp, Artificial Sequence; identical to SEQ ID NO: 28964
  Description of Artificial Sequence: Synthetic casein; inner sequence

SEQ ID NO: 48371 - DNA, 32 bp, Artificial Sequence; identical to SEQ ID NO: 44452
  Description of Artificial Sequence: Synthetic casein; inner sequence

SEQ ID NO: 48372 - DNA, 30 bp, Artificial Sequence; identical to SEQ ID NO: 42
  Description of Artificial Sequence: Synthetic casein; inner sequence

SEQ ID NO: 48373 - DNA, 30 bp, Artificial Sequence; identical to SEQ ID NO: 44372
  Description of Artificial Sequence: Synthetic casein; inner sequence

SEQ ID NO: 48374 - DNA, 30 bp, Artificial Sequence; identical to SEQ ID NO: 104
  Description of Artificial Sequence: Synthetic casein; inner sequence

SEQ ID NO: 48375 - DNA, 30 bp, Artificial Sequence; identical to SEQ ID NO: 28921
  Description of Artificial Sequence: Synthetic casein; inner sequence

SEQ ID NO: 48376 - DNA, 30 bp, Artificial Sequence; identical to SEQ ID NO: 560
  Description of Artificial Sequence: Synthetic casein; inner sequence

SEQ ID NO: 48377 - DNA, 30 bp, Artificial Sequence; identical to SEQ ID NO: 493
  Description of Artificial Sequence: Synthetic casein; inner sequence

SEQ ID NO: 48378 - DNA, 30 bp, Artificial Sequence; identical to SEQ ID NO: 16862
  Description of Artificial Sequence: Synthetic casein; inner sequence

SEQ ID NO: 48379 - DNA, 30 bp, Artificial Sequence; identical to SEQ ID NO: 4621
  Description of Artificial Sequence: Synthetic casein; inner sequence

SEQ ID NO: 48380 - DNA, 30 bp, Artificial Sequence; identical to SEQ ID NO: 28739
  Description of Artificial Sequence: Synthetic casein; inner sequence

SEQ ID NO: 48381 - DNA, 30 bp, Artificial Sequence; identical to SEQ ID NO: 82
  Description of Artificial Sequence: Synthetic casein; inner sequence

SEQ ID NO: 48382 - DNA, 30 bp, Artificial Sequence
  Description of Artificial Sequence: Synthetic casein; inner sequence
ggacgcaacgtaccgtatcatgtaggcatg

SEQ ID NO: 48383 - DNA, 30 bp, Artificial Sequence; identical to SEQ ID NO: 28805
  Description of Artificial Sequence: Synthetic casein; inner sequence

SEQ ID NO: 48384 - DNA, 30 bp, Artificial Sequence; identical to SEQ ID NO: 44385
  Description of Artificial Sequence: Synthetic casein; inner sequence

SEQ ID NO: 48385 - DNA, 30 bp, Artificial Sequence; identical to SEQ ID NO: 50
  Description of Artificial Sequence: Synthetic casein; inner sequence

SEQ ID NO: 48386 - DNA, 30 bp, Artificial Sequence; identical to SEQ ID NO: 44507
  Description of Artificial Sequence: Synthetic casein; inner sequence

SEQ ID NO: 48387 - DNA, 28 bp, Artificial Sequence
  Description of Artificial Sequence: Synthetic casein; inner sequence
ggacgcaacgtaccttatcgtggccatg

SEQ ID NO: 48388 - DNA, 30 bp, Artificial Sequence; identical to SEQ ID NO: 44305
  Description of Artificial Sequence: Synthetic casein; inner sequence

SEQ ID NO: 48389 - DNA, 30 bp, Artificial Sequence; identical to SEQ ID NO: 98
  Description of Artificial Sequence: Synthetic casein; inner sequence

SEQ ID NO: 48390 - DNA, 30 bp, Artificial Sequence; identical to SEQ ID NO: 20722
  Description of Artificial Sequence: Synthetic casein; inner sequence

SEQ ID NO: 48391 - DNA, 30 bp, Artificial Sequence; identical to SEQ ID NO: 28312
  Description of Artificial Sequence: Synthetic casein; inner sequence

SEQ ID NO: 48392 - DNA, 30 bp, Artificial Sequence; identical to SEQ ID NO: 4576
  Description of Artificial Sequence: Synthetic casein; inner sequence

SEQ ID NO: 48393 - DNA, 30 bp, Artificial Sequence; identical to SEQ ID NO: 28503
  Description of Artificial Sequence: Synthetic casein; inner sequence

SEQ ID NO: 48394 - DNA, 30 bp, Artificial Sequence; identical to SEQ ID NO: 32384
  Description of Artificial Sequence: Synthetic casein; inner sequence

SEQ ID NO: 48395 - DNA, 30 bp, Artificial Sequence; identical to SEQ ID NO: 44657
  Description of Artificial Sequence: Synthetic casein; inner sequence

SEQ ID NO: 48396 - DNA, 30 bp, Artificial Sequence; identical to SEQ ID NO: 20983
  Description of Artificial Sequence: Synthetic casein; inner sequence

SEQ ID NO: 48397 - DNA, 30 bp, Artificial Sequence; identical to SEQ ID NO: 152
  Description of Artificial Sequence: Synthetic casein; inner sequence

SEQ ID NO: 48398 - DNA, 30 bp, Artificial Sequence; identical to SEQ ID NO: 44846
  Description of Artificial Sequence: Synthetic casein; inner sequence

SEQ ID NO: 48399 - DNA, 30 bp, Artificial Sequence; identical to SEQ ID NO: 634
  Description of Artificial Sequence: Synthetic casein; inner sequence

SEQ ID NO: 48400 - DNA, 30 bp, Artificial Sequence; identical to SEQ ID NO: 44225
  Description of Artificial Sequence: Synthetic casein; inner sequence

SEQ ID NO: 48401 - DNA, 30 bp, Artificial Sequence; identical to SEQ ID NO: 44547
  Description of Artificial Sequence: Synthetic casein; inner sequence

SEQ ID NO: 48402 - DNA, 30 bp, Artificial Sequence; identical to SEQ ID NO: 857
  Description of Artificial Sequence: Synthetic casein; inner sequence

SEQ ID NO: 48403 - DNA, 30 bp, Artificial Sequence; identical to SEQ ID NO: 4579
  Description of Artificial Sequence: Synthetic casein; inner sequence

SEQ ID NO: 48404 - DNA, 30 bp, Artificial Sequence; identical to SEQ ID NO: 236
  Description of Artificial Sequence: Synthetic casein; inner sequence

SEQ ID NO: 48405 - DNA, 30 bp, Artificial Sequence; identical to SEQ ID NO: 291
  Description of Artificial Sequence: Synthetic casein; inner sequence

SEQ ID NO: 48406 - DNA, 30 bp, Artificial Sequence; identical to SEQ ID NO: 44465
  Description of Artificial Sequence: Synthetic casein; inner sequence

SEQ ID NO: 48407 - DNA, 30 bp, Artificial Sequence
  Description of Artificial Sequence: Synthetic casein; inner sequence
gcgtcacggatcatgcgtacgtatcgtgcg

SEQ ID NO: 48408 - DNA, 30 bp, Artificial Sequence; identical to SEQ ID NO: 44388
  Description of Artificial Sequence: Synthetic casein; inner sequence

SEQ ID NO: 48409 - DNA, 30 bp, Artificial Sequence; identical to SEQ ID NO: 44509
  Description of Artificial Sequence: Synthetic casein; inner sequence

SEQ ID NO: 48410 - DNA, 30 bp, Artificial Sequence; identical to SEQ ID NO: 275
  Description of Artificial Sequence: Synthetic casein; inner sequence

SEQ ID NO: 48411 - DNA, 30 bp, Artificial Sequence; identical to SEQ ID NO: 4419
  Description of Artificial Sequence: Synthetic casein; inner sequence

SEQ ID NO: 48412 - DNA, 30 bp, Artificial Sequence; identical to SEQ ID NO: 44454
  Description of Artificial Sequence: Synthetic casein; inner sequence

SEQ ID NO: 48413 - DNA, 30 bp, Artificial Sequence; identical to SEQ ID NO: 44444
  Description of Artificial Sequence: Synthetic casein; inner sequence

SEQ ID NO: 48414 - DNA, 30 bp, Artificial Sequence; identical to SEQ ID NO: 44886
  Description of Artificial Sequence: Synthetic casein; inner sequence

SEQ ID NO: 48415 - DNA, 30 bp, Artificial Sequence; identical to SEQ ID NO: 647
  Description of Artificial Sequence: Synthetic casein; inner sequence

SEQ ID NO: 48416 - DNA, 30 bp, Artificial Sequence; identical to SEQ ID NO: 44367
  Description of Artificial Sequence: Synthetic casein; inner sequence

SEQ ID NO: 48417 - DNA, 30 bp, Artificial Sequence; identical to SEQ ID NO: 44878
  Description of Artificial Sequence: Synthetic casein; inner sequence

SEQ ID NO: 48418 - DNA, 30 bp, Artificial Sequence
  Description of Artificial Sequence: Synthetic casein; inner sequence
gttgcgcacacataccgttcgtacgtcacg

SEQ ID NO: 48419 - DNA, 30 bp, Artificial Sequence; identical to SEQ ID NO: 5000
  Description of Artificial Sequence: Synthetic casein; inner sequence

SEQ ID NO: 48420 - DNA, 30 bp, Artificial Sequence; identical to SEQ ID NO: 90
  Description of Artificial Sequence: Synthetic casein; inner sequence

SEQ ID NO: 48421 - DNA, 30 bp, Artificial Sequence; identical to SEQ ID NO: 28659
  Description of Artificial Sequence: Synthetic casein; inner sequence

SEQ ID NO: 48422 - DNA, 30 bp, Artificial Sequence; identical to SEQ ID NO: 44370
  Description of Artificial Sequence: Synthetic casein; inner sequence

SEQ ID NO: 48423 - DNA, 30 bp, Artificial Sequence; identical to SEQ ID NO: 561
  Description of Artificial Sequence: Synthetic casein; inner sequence

SEQ ID NO: 48424 - DNA, 30 bp, Artificial Sequence; identical to SEQ ID NO: 44391
  Description of Artificial Sequence: Synthetic casein; inner sequence

SEQ ID NO: 48425 - DNA, 30 bp, Artificial Sequence; identical to SEQ ID NO: 44287
  Description of Artificial Sequence: Synthetic casein; inner sequence

SEQ ID NO: 48426 - DNA, 30 bp, Artificial Sequence; identical to SEQ ID NO: 28914
  Description of Artificial Sequence: Synthetic casein; inner sequence

SEQ ID NO: 48427 - DNA, 30 bp, Artificial Sequence; identical to SEQ ID NO: 8928
  Description of Artificial Sequence: Synthetic casein; inner sequence

SEQ ID NO: 48428 - DNA, 30 bp, Artificial Sequence; identical to SEQ ID NO: 20776
  Description of Artificial Sequence: Synthetic casein; inner sequence

SEQ ID NO: 48429 - DNA, 30 bp, Artificial Sequence; identical to SEQ ID NO: 492
  Description of Artificial Sequence: Synthetic casein; inner sequence

SEQ ID NO: 48430 - DNA, 30 bp, Artificial Sequence; identical to SEQ ID NO: 4933
  Description of Artificial Sequence: Synthetic casein; inner sequence

SEQ ID NO: 48431 - DNA, 29 bp, Artificial Sequence
  Description of Artificial Sequence: Synthetic casein; inner sequence
gcgtgtgacgtgcagcatgtgtcgtgaca

SEQ ID NO: 48432 - DNA, 30 bp, Artificial Sequence; identical to SEQ ID NO: 375
  Description of Artificial Sequence: Synthetic casein; inner sequence

SEQ ID NO: 48433 - DNA, 30 bp, Artificial Sequence; identical to SEQ ID NO: 44873
  Description of Artificial Sequence: Synthetic casein; inner sequence

SEQ ID NO: 48434 - DNA, 30 bp, Artificial Sequence; identical to SEQ ID NO: 742
  Description of Artificial Sequence: Synthetic casein; inner sequence

SEQ ID NO: 48435 - DNA, 30 bp, Artificial Sequence
  Description of Artificial Sequence: Synthetic casein; inner sequence
cgatacgtaggcatggcgtgtacgtgcaca

SEQ ID NO: 48436 - DNA, 30 bp, Artificial Sequence; identical to SEQ ID NO: 44859
  Description of Artificial Sequence: Synthetic casein; inner sequence

SEQ ID NO: 48437 - DNA, 30 bp, Artificial Sequence; identical to SEQ ID NO: 16389
  Description of Artificial Sequence: Synthetic casein; inner sequence

SEQ ID NO: 48438 - DNA, 30 bp, Artificial Sequence; identical to SEQ ID NO: 28665
  Description of Artificial Sequence: Synthetic casein; inner sequence

SEQ ID NO: 48439 - DNA, 30 bp, Artificial Sequence; identical to SEQ ID NO: 44389
  Description of Artificial Sequence: Synthetic casein; inner sequence

SEQ ID NO: 48440 - DNA, 30 bp, Artificial Sequence
  Description of Artificial Sequence: Synthetic casein; inner sequence
ggacgcaacgtaccgtctcgtggccatgtg

SEQ ID NO: 48441 - DNA, 30 bp, Artificial Sequence; identical to SEQ ID NO: 61
  Description of Artificial Sequence: Synthetic casein; inner sequence

SEQ ID NO: 48442 - DNA, 30 bp, Artificial Sequence; identical to SEQ ID NO: 4867
  Description of Artificial Sequence: Synthetic casein; inner sequence

SEQ ID NO: 48443 - DNA, 30 bp, Artificial Sequence; identical to SEQ ID NO: 20784
  Description of Artificial Sequence: Synthetic casein; inner sequence

SEQ ID NO: 48444 - DNA, 31 bp, Artificial Sequence; identical to SEQ ID NO: 221
  Description of Artificial Sequence: Synthetic casein; inner sequence

SEQ ID NO: 48445 - DNA, 30 bp, Artificial Sequence; identical to SEQ ID NO: 28306
  Description of Artificial Sequence: Synthetic casein; inner sequence

SEQ ID NO: 48446 - DNA, 30 bp, Artificial Sequence
  Description of Artificial Sequence: Synthetic casein; inner sequence
gcgtcacagcacatcgccttactcgtcacg

SEQ ID NO: 48447 - DNA, 30 bp, Artificial Sequence; identical to SEQ ID NO: 44560
  Description of Artificial Sequence: Synthetic casein; inner sequence

SEQ ID NO: 48448 - DNA, 30 bp, Artificial Sequence; identical to SEQ ID NO: 4653
  Description of Artificial Sequence: Synthetic casein; inner sequence

SEQ ID NO: 48449 - DNA, 30 bp, Artificial Sequence
  Description of Artificial Sequence: Synthetic casein; inner sequence
cgtcacgcagtacgttcgcattacgtcaca

SEQ ID NO: 48450 - DNA, 30 bp, Artificial Sequence; identical to SEQ ID NO: 661
  Description of Artificial Sequence: Synthetic casein; inner sequence

SEQ ID NO: 48451 - DNA, 30 bp, Artificial Sequence; identical to SEQ ID NO: 173
  Description of Artificial Sequence: Synthetic casein; inner sequence

SEQ ID NO: 48452 - DNA, 30 bp, Artificial Sequence; identical to SEQ ID NO: 16457
  Description of Artificial Sequence: Synthetic casein; inner sequence

SEQ ID NO: 48453 - DNA, 30 bp, Artificial Sequence; identical to SEQ ID NO: 247
  Description of Artificial Sequence: Synthetic casein; inner sequence

SEQ ID NO: 48454 - DNA, 30 bp, Artificial Sequence; identical to SEQ ID NO: 44565
  Description of Artificial Sequence: Synthetic casein; inner sequence

SEQ ID NO: 48455 - DNA, 30 bp, Artificial Sequence
  Description of Artificial Sequence: Synthetic casein; inner sequence
cgtaacgcgcatcgtacgtgtgacgcatcg

SEQ ID NO: 48456 - DNA, 30 bp, Artificial Sequence
  Description of Artificial Sequence: Synthetic casein; inner sequence
gcgttacggtgcatgacgccttccgacacg

SEQ ID NO: 48457 - DNA, 30 bp, Artificial Sequence; identical to SEQ ID NO: 4543
  Description of Artificial Sequence: Synthetic casein; inner sequence

SEQ ID NO: 48458 - DNA, 30 bp, Artificial Sequence
  Description of Artificial Sequence: Synthetic casein; inner sequence
gcgatgcgcgttacgtacgacatcgacacg

SEQ ID NO: 48459 - DNA, 30 bp, Artificial Sequence; identical to SEQ ID NO: 12743
  Description of Artificial Sequence: Synthetic casein; inner sequence

SEQ ID NO: 48460 - DNA, 30 bp, Artificial Sequence
  Description of Artificial Sequence: Synthetic casein; inner sequence
gcgtgaggcaacgtagcgtacgtcgtcgca

SEQ ID NO: 48461 - DNA, 30 bp, Artificial Sequence; identical to SEQ ID NO: 16769
  Description of Artificial Sequence: Synthetic casein; inner sequence

SEQ ID NO: 48462 - DNA, 30 bp, Artificial Sequence; identical to SEQ ID NO: 20496
  Description of Artificial Sequence: Synthetic casein; inner sequence

SEQ ID NO: 48463 - DNA, 30 bp, Artificial Sequence; identical to SEQ ID NO: 4924
  Description of Artificial Sequence: Synthetic casein; inner sequence

SEQ ID NO: 48464 - DNA, 30 bp, Artificial Sequence
  Description of Artificial Sequence: Synthetic casein; inner sequence
gctgtggcagtacgtatgccctgcgtcacg

SEQ ID NO: 48465 - DNA, 30 bp, Artificial Sequence; identical to SEQ ID NO: 219
  Description of Artificial Sequence: Synthetic casein; inner sequence

SEQ ID NO: 48466 - DNA, 30 bp, Artificial Sequence
  Description of Artificial Sequence: Synthetic casein; inner sequence
acgtcacacgctgcgtaacgacacgtcaca

SEQ ID NO: 48467 - DNA, 30 bp, Artificial Sequence; identical to SEQ ID NO: 5002
  Description of Artificial Sequence: Synthetic casein; inner sequence

SEQ ID NO: 48468 - DNA, 30 bp, Artificial Sequence
  Description of Artificial Sequence: Synthetic casein; inner sequence
gcactgcacgcaccctatcatggcggcatg

SEQ ID NO: 48469 - DNA, 30 bp, Artificial Sequence; identical to SEQ ID NO: 16612
  Description of Artificial Sequence: Synthetic casein; inner sequence

SEQ ID NO: 48470 - DNA, 30 bp, Artificial Sequence; identical to SEQ ID NO: 28668
  Description of Artificial Sequence: Synthetic casein; inner sequence

SEQ ID NO: 48471 - DNA, 30 bp, Artificial Sequence; identical to SEQ ID NO: 16718
  Description of Artificial Sequence: Synthetic casein; inner sequence

SEQ ID NO: 48472 - DNA, 30 bp, Artificial Sequence; identical to SEQ ID NO: 229
  Description of Artificial Sequence: Synthetic casein; inner sequence

SEQ ID NO: 48473 - DNA, 30 bp, Artificial Sequence; identical to SEQ ID NO: 20683
  Description of Artificial Sequence: Synthetic casein; inner sequence

SEQ ID NO: 48474 - DNA, 30 bp, Artificial Sequence; identical to SEQ ID NO: 76
  Description of Artificial Sequence: Synthetic casein; inner sequence

SEQ ID NO: 48475 - DNA, 30 bp, Artificial Sequence; identical to SEQ ID NO: 44425
  Description of Artificial Sequence: Synthetic casein; inner sequence

SEQ ID NO: 48476 - DNA, 30 bp, Artificial Sequence; identical to SEQ ID NO: 28584
  Description of Artificial Sequence: Synthetic casein; inner sequence

SEQ ID NO: 48477 - DNA, 30 bp, Artificial Sequence; identical to SEQ ID NO: 16709
  Description of Artificial Sequence: Synthetic casein; inner sequence

SEQ ID NO: 48478 - DNA, 30 bp, Artificial Sequence; identical to SEQ ID NO: 44426
  Description of Artificial Sequence: Synthetic casein; inner sequence

SEQ ID NO: 48479 - DNA, 30 bp, Artificial Sequence; identical to SEQ ID NO: 20880
  Description of Artificial Sequence: Synthetic casein; inner sequence

SEQ ID NO: 48480 - DNA, 30 bp, Artificial Sequence
  Description of Artificial Sequence: Synthetic casein; inner sequence
gtcacgcgatgcatggtacgttgcgacacg

SEQ ID NO: 48481 - DNA, 28 bp, Artificial Sequence
  Description of Artificial Sequence: Synthetic casein; inner sequence
gtacgatgctgcccgacatgtgtacgtg

SEQ ID NO: 48482 - DNA, 30 bp, Artificial Sequence
  Description of Artificial Sequence: Synthetic casein; inner sequence
gcatatcgcacagtacgtcactgcgtcacg

SEQ ID NO: 48483 - DNA, 30 bp, Artificial Sequence; identical to SEQ ID NO: 44894
  Description of Artificial Sequence: Synthetic casein; inner sequence

SEQ ID NO: 48484 - DNA, 30 bp, Artificial Sequence; identical to SEQ ID NO: 16988
  Description of Artificial Sequence: Synthetic casein; inner sequence

SEQ ID NO: 48485 - DNA, 30 bp, Artificial Sequence; identical to SEQ ID NO: 44651
  Description of Artificial Sequence: Synthetic casein; inner sequence

SEQ ID NO: 48486 - DNA, 30 bp, Artificial Sequence
  Description of Artificial Sequence: Synthetic casein; inner sequence
gcgtcgtaacgtcacgtccgtcgctacacg

SEQ ID NO: 48487 - DNA, 30 bp, Artificial Sequence; identical to SEQ ID NO: 136
  Description of Artificial Sequence: Synthetic casein; inner sequence

SEQ ID NO: 48488 - DNA, 30 bp, Artificial Sequence; identical to SEQ ID NO: 44627
  Description of Artificial Sequence: Synthetic casein; inner sequence

SEQ ID NO: 48489 - DNA, 30 bp, Artificial Sequence; identical to SEQ ID NO: 44470
  Description of Artificial Sequence: Synthetic casein; inner sequence

SEQ ID NO: 48490 - DNA, 30 bp, Artificial Sequence
  Description of Artificial Sequence: Synthetic casein; inner sequence
gcataccgtgtgtgcgtcggtccgtacgcg

SEQ ID NO: 48491 - DNA, 30 bp, Artificial Sequence; identical to SEQ ID NO: 507
  Description of Artificial Sequence: Synthetic casein; inner sequence

SEQ ID NO: 48492 - DNA, 30 bp, Artificial Sequence; identical to SEQ ID NO: 16651
  Description of Artificial Sequence: Synthetic casein; inner sequence

SEQ ID NO: 48493 - DNA, 30 bp, Artificial Sequence; identical to SEQ ID NO: 242
  Description of Artificial Sequence: Synthetic casein; inner sequence

SEQ ID NO: 48494 - DNA, 30 bp, Artificial Sequence; identical to SEQ ID NO: 20530
  Description of Artificial Sequence: Synthetic casein; inner sequence

SEQ ID NO: 48495 - DNA, 30 bp, Artificial Sequence; identical to SEQ ID NO: 277
  Description of Artificial Sequence: Synthetic casein; inner sequence

SEQ ID NO: 48496 - DNA, 30 bp, Artificial Sequence; identical to SEQ ID NO: 20580
  Description of Artificial Sequence: Synthetic casein; inner sequence

SEQ ID NO: 48497 - DNA, 30 bp, Artificial Sequence; identical to SEQ ID NO: 217
  Description of Artificial Sequence: Synthetic casein; inner sequence

SEQ ID NO: 48498 - DNA, 30 bp, Artificial Sequence; identical to SEQ ID NO: 4988
  Description of Artificial Sequence: Synthetic casein; inner sequence

SEQ ID NO: 48499 - DNA, 30 bp, Artificial Sequence; identical to SEQ ID NO: 44853
  Description of Artificial Sequence: Synthetic casein; inner sequence

SEQ ID NO: 48500 - DNA, 30 bp, Artificial Sequence; identical to SEQ ID NO: 16829
  Description of Artificial Sequence: Synthetic casein; inner sequence

SEQ ID NO: 48501 - DNA, 30 bp, Artificial Sequence; identical to SEQ ID NO: 32505
  Description of Artificial Sequence: Synthetic casein; inner sequence

SEQ ID NO: 48502 - DNA, 30 bp, Artificial Sequence; identical to SEQ ID NO: 28814
  Description of Artificial Sequence: Synthetic casein; inner sequence

SEQ ID NO: 48503 - DNA, 30 bp, Artificial Sequence; identical to SEQ ID NO: 20903
  Description of Artificial Sequence: Synthetic casein; inner sequence

SEQ ID NO: 48504 - DNA, 30 bp, Artificial Sequence
  Description of Artificial Sequence: Synthetic casein; inner sequence
gcgatgcacgtcaacactacgtccttcacg

SEQ ID NO: 48505 - DNA, 30 bp, Artificial Sequence; identical to SEQ ID NO: 44966
  Description of Artificial Sequence: Synthetic casein; inner sequence

SEQ ID NO: 48506 - DNA, 30 bp, Artificial Sequence; identical to SEQ ID NO: 16892
  Description of Artificial Sequence: Synthetic casein; inner sequence

SEQ ID NO: 48507 - DNA, 30 bp, Artificial Sequence
  Description of Artificial Sequence: Synthetic casein; inner sequence
gcgatacgcaaggacggcatgacctacgca

SEQ ID NO: 48508 - DNA, 30 bp, Artificial Sequence
  Description of Artificial Sequence: Synthetic casein; inner sequence
gtgcgtcacgttcccatcatgtacgacacg

SEQ ID NO: 48509 - DNA, 30 bp, Artificial Sequence; identical to SEQ ID NO: 44751
  Description of Artificial Sequence: Synthetic casein; inner sequence

SEQ ID NO: 48510 - DNA, 30 bp, Artificial Sequence; identical to SEQ ID NO: 28806
  Description of Artificial Sequence: Synthetic casein; inner sequence

SEQ ID NO: 48511 - DNA, 30 bp, Artificial Sequence; identical to SEQ ID NO: 28984
  Description of Artificial Sequence: Synthetic casein; inner sequence

SEQ ID NO: 48512 - DNA, 30 bp, Artificial Sequence; identical to SEQ ID NO: 407
  Description of Artificial Sequence: Synthetic casein; inner sequence

SEQ ID NO: 48513 - DNA, 30 bp, Artificial Sequence; identical to SEQ ID NO: 20972
  Description of Artificial Sequence: Synthetic casein; inner sequence

SEQ ID NO: 48514 - DNA, 30 bp, Artificial Sequence; identical to SEQ ID NO: 4603
  Description of Artificial Sequence: Synthetic casein; inner sequence

SEQ ID NO: 48515 - DNA, 30 bp, Artificial Sequence; identical to SEQ ID NO: 398
  Description of Artificial Sequence: Synthetic casein; inner sequence

SEQ ID NO: 48516 - DNA, 30 bp, Artificial Sequence; identical to SEQ ID NO: 4420
  Description of Artificial Sequence: Synthetic casein; inner sequence

SEQ ID NO: 48517 - DNA, 29 bp, Artificial Sequence
  Description of Artificial Sequence: Synthetic casein; inner sequence
cgtaccgcaagtgacgtgtccgtgccgtg

SEQ ID NO: 48518 - DNA, 30 bp, Artificial Sequence
  Description of Artificial Sequence: Synthetic casein; inner sequence
cgtgacgcatgtgaggcatcgtgtgtcgcg

SEQ ID NO: 48519 - DNA, 30 bp, Artificial Sequence; identical to SEQ ID NO: 44312
  Description of Artificial Sequence: Synthetic casein; inner sequence

SEQ ID NO: 48520 - DNA, 30 bp, Artificial Sequence; identical to SEQ ID NO: 317
  Description of Artificial Sequence: Synthetic casein; inner sequence

SEQ ID NO: 48521 - DNA, 30 bp, Artificial Sequence
  Description of Artificial Sequence: Synthetic casein; inner sequence
gcatgtgacgacgatgtgccgtgatgcatg

SEQ ID NO: 48522 - DNA, 30 bp, Artificial Sequence; identical to SEQ ID NO: 44752
  Description of Artificial Sequence: Synthetic casein; inner sequence

SEQ ID NO: 48523 - DNA, 30 bp, Artificial Sequence; identical to SEQ ID NO: 142
  Description of Artificial Sequence: Synthetic casein; inner sequence

SEQ ID NO: 48524 - DNA, 30 bp, Artificial Sequence; identical to SEQ ID NO: 28670
  Description of Artificial Sequence: Synthetic casein; inner sequence

SEQ ID NO: 48525 - DNA, 30 bp, Artificial Sequence; identical to SEQ ID NO: 28753
  Description of Artificial Sequence: Synthetic casein; inner sequence

SEQ ID NO: 48526 - DNA, 30 bp, Artificial Sequence; identical to SEQ ID NO: 28741
  Description of Artificial Sequence: Synthetic casein; inner sequence

SEQ ID NO: 48527 - DNA, 30 bp, Artificial Sequence; identical to SEQ ID NO: 12821
  Description of Artificial Sequence: Synthetic casein; inner sequence

SEQ ID NO: 48528 - DNA, 30 bp, Artificial Sequence; identical to SEQ ID NO: 369
  Description of Artificial Sequence: Synthetic casein; inner sequence

SEQ ID NO: 48529 - DNA, 30 bp, Artificial Sequence; identical to SEQ ID NO: 20817
  Description of Artificial Sequence: Synthetic casein; inner sequence

SEQ ID NO: 48530 - DNA, 30 bp, Artificial Sequence; identical to SEQ ID NO: 32
  Description of Artificial Sequence: Synthetic casein; inner sequence

SEQ ID NO: 48531 - DNA, 30 bp, Artificial Sequence
  Description of Artificial Sequence: Synthetic casein; inner sequence
gcgtcacggtgatgcgttgtgctgttcgtg

SEQ ID NO: 48532 - DNA, 30 bp, Artificial Sequence; identical to SEQ ID NO: 420
  Description of Artificial Sequence: Synthetic casein; inner sequence

SEQ ID NO: 48533 - DNA, 30 bp, Artificial Sequence; identical to SEQ ID NO: 28980
  Description of Artificial Sequence: Synthetic casein; inner sequence

SEQ ID NO: 48534 - DNA, 30 bp, Artificial Sequence; identical to SEQ ID NO: 16688
  Description of Artificial Sequence: Synthetic casein; inner sequence

SEQ ID NO: 48535 - DNA, 30 bp, Artificial Sequence; identical to SEQ ID NO: 583
  Description of Artificial Sequence: Synthetic casein; inner sequence

SEQ ID NO: 48536 - DNA, 30 bp, Artificial Sequence; identical to SEQ ID NO: 28412
  Description of Artificial Sequence: Synthetic casein; inner sequence

SEQ ID NO: 48537 - DNA, 30 bp, Artificial Sequence; identical to SEQ ID NO: 8953
  Description of Artificial Sequence: Synthetic casein; inner sequence

SEQ ID NO: 48538 - DNA, 30 bp, Artificial Sequence; identical to SEQ ID NO: 44841
  Description of Artificial Sequence: Synthetic casein; inner sequence

SEQ ID NO: 48539 - DNA, 30 bp, Artificial Sequence; identical to SEQ ID NO: 44412
  Description of Artificial Sequence: Synthetic casein; inner sequence

SEQ ID NO: 48540 - DNA, 30 bp, Artificial Sequence; identical to SEQ ID NO: 4356
  Description of Artificial Sequence: Synthetic casein; inner sequence

SEQ ID NO: 48541 - DNA, 30 bp, Artificial Sequence; identical to SEQ ID NO: 8938
  Description of Artificial Sequence: Synthetic casein; inner sequence

SEQ ID NO: 48542 - DNA, 30 bp, Artificial Sequence; identical to SEQ ID NO: 44781
  Description of Artificial Sequence: Synthetic casein; inner sequence

SEQ ID NO: 48543 - DNA, 30 bp, Artificial Sequence; identical to SEQ ID NO: 223
  Description of Artificial Sequence: Synthetic casein; inner sequence

SEQ ID NO: 48544 - DNA, 30 bp, Artificial Sequence; identical to SEQ ID NO: 44838
  Description of Artificial Sequence: Synthetic casein; inner sequence

SEQ ID NO: 48545 - DNA, 28 bp, Artificial Sequence
  Description of Artificial Sequence: Synthetic casein; inner sequence
ggacgcagctgacctagcatgtgtgtca

SEQ ID NO: 48546 - DNA, 30 bp, Artificial Sequence; identical to SEQ ID NO: 20960
  Description of Artificial Sequence: Synthetic casein; inner sequence

SEQ ID NO: 48547 - DNA, 30 bp, Artificial Sequence; identical to SEQ ID NO: 44597
  Description of Artificial Sequence: Synthetic casein; inner sequence

SEQ ID NO: 48548 - DNA, 30 bp, Artificial Sequence; identical to SEQ ID NO: 20426
  Description of Artificial Sequence: Synthetic casein; inner sequence

SEQ ID NO: 48549 - DNA, 30 bp, Artificial Sequence; identical to SEQ ID NO: 72
  Description of Artificial Sequence: Synthetic casein; inner sequence

SEQ ID NO: 48550 - DNA, 30 bp, Artificial Sequence; identical to SEQ ID NO: 4748
  Description of Artificial Sequence: Synthetic casein; inner sequence

SEQ ID NO: 48551 - DNA, 30 bp, Artificial Sequence; identical to SEQ ID NO: 805
  Description of Artificial Sequence: Synthetic casein; inner sequence

SEQ ID NO: 48552 - DNA, 30 bp, Artificial Sequence; identical to SEQ ID NO: 44595
  Description of Artificial Sequence: Synthetic casein; inner sequence

SEQ ID NO: 48553 - DNA, 30 bp, Artificial Sequence; identical to SEQ ID NO: 44422
  Description of Artificial Sequence: Synthetic casein; inner sequence

SEQ ID NO: 48554 - DNA, 30 bp, Artificial Sequence; identical to SEQ ID NO: 44527
  Description of Artificial Sequence: Synthetic casein; inner sequence

SEQ ID NO: 48555 - DNA, 30 bp, Artificial Sequence; identical to SEQ ID NO: 17001
  Description of Artificial Sequence: Synthetic casein; inner sequence

SEQ ID NO: 48556 - DNA, 30 bp, Artificial Sequence; identical to SEQ ID NO: 110
  Description of Artificial Sequence: Synthetic casein; inner sequence

SEQ ID NO: 48557 - DNA, 30 bp, Artificial Sequence
  Description of Artificial Sequence: Synthetic casein; inner sequence
gcgacatcgtagcatggtccttgctgcacg

SEQ ID NO: 48558 - DNA, 30 bp, Artificial Sequence; identical to SEQ ID NO: 4890
  Description of Artificial Sequence: Synthetic casein; inner sequence

SEQ ID NO: 48559 - DNA, 30 bp, Artificial Sequence; identical to SEQ ID NO: 44910
  Description of Artificial Sequence: Synthetic casein; inner sequence

SEQ ID NO: 48560 - DNA, 30 bp, Artificial Sequence; identical to SEQ ID NO: 44704
  Description of Artificial Sequence: Synthetic casein; inner sequence

SEQ ID NO: 48561 - DNA, 29 bp, Artificial Sequence
  Description of Artificial Sequence: Synthetic casein; inner sequence
ggacgcagcgaaccgtacgtggacgtgca

SEQ ID NO: 48562 - DNA, 30 bp, Artificial Sequence; identical to SEQ ID NO: 205
  Description of Artificial Sequence: Synthetic casein; inner sequence

SEQ ID NO: 48563 - DNA, 30 bp, Artificial Sequence; identical to SEQ ID NO: 20596
  Description of Artificial Sequence: Synthetic casein; inner sequence

SEQ ID NO: 48564 - DNA, 30 bp, Artificial Sequence; identical to SEQ ID NO: 86
  Description of Artificial Sequence: Synthetic casein; inner sequence

SEQ ID NO: 48565 - DNA, 30 bp, Artificial Sequence
  Description of Artificial Sequence: Synthetic casein; inner sequence
gcatgtcgtgcgatgtcgttgtgctgcacg

SEQ ID NO: 48566 - DNA, 30 bp, Artificial Sequence; identical to SEQ ID NO: 678
  Description of Artificial Sequence: Synthetic casein; inner sequence

SEQ ID NO: 48567 - DNA, 28 bp, Artificial Sequence
  Description of Artificial Sequence: Synthetic casein; inner sequence
ggccgcaacgtaccgtatcgtggccatg

SEQ ID NO: 48568 - DNA, 30 bp, Artificial Sequence
  Description of Artificial Sequence: Synthetic casein; inner sequence
cgtacgcaagggcacggtacgtacgacacg

SEQ ID NO: 48569 - DNA, 30 bp, Artificial Sequence; identical to SEQ ID NO: 16748
  Description of Artificial Sequence: Synthetic casein; inner sequence

SEQ ID NO: 48570 - DNA, 30 bp, Artificial Sequence; identical to SEQ ID NO: 4987
  Description of Artificial Sequence: Synthetic casein; inner sequence

SEQ ID NO: 48571 - DNA, 30 bp, Artificial Sequence
  Description of Artificial Sequence: Synthetic casein; inner sequence
ggcattcgatgaacgaggcatgatgcgtca

SEQ ID NO: 48572 - DNA, 30 bp, Artificial Sequence; identical to SEQ ID NO: 4802
  Description of Artificial Sequence: Synthetic casein; inner sequence

SEQ ID NO: 48573 - DNA, 30 bp, Artificial Sequence; identical to SEQ ID NO: 28563
  Description of Artificial Sequence: Synthetic casein; inner sequence

SEQ ID NO: 48574 - DNA, 30 bp, Artificial Sequence; identical to SEQ ID NO: 34
  Description of Artificial Sequence: Synthetic casein; inner sequence

SEQ ID NO: 48575 - DNA, 30 bp, Artificial Sequence; identical to SEQ ID NO: 521
  Description of Artificial Sequence: Synthetic casein; inner sequence

SEQ ID NO: 48576 - DNA, 30 bp, Artificial Sequence; identical to SEQ ID NO: 28979
  Description of Artificial Sequence: Synthetic casein; inner sequence

SEQ ID NO: 48577 - DNA, 30 bp, Artificial Sequence; identical to SEQ ID NO: 551
  Description of Artificial Sequence: Synthetic casein; inner sequence

SEQ ID NO: 48578 - DNA, 30 bp, Artificial Sequence; identical to SEQ ID NO: 44674
  Description of Artificial Sequence: Synthetic casein; inner sequence

SEQ ID NO: 48579 - DNA, 30 bp, Artificial Sequence; identical to SEQ ID NO: 44972
  Description of Artificial Sequence: Synthetic casein; inner sequence

SEQ ID NO: 48580 - DNA, 30 bp, Artificial Sequence; identical to SEQ ID NO: 36797
  Description of Artificial Sequence: Synthetic casein; inner sequence

SEQ ID NO: 48581 - DNA, 30 bp, Artificial Sequence; identical to SEQ ID NO: 44555
  Description of Artificial Sequence: Synthetic casein; inner sequence

SEQ ID NO: 48582 - DNA, 30 bp, Artificial Sequence; identical to SEQ ID NO: 44596
  Description of Artificial Sequence: Synthetic casein; inner sequence

SEQ ID NO: 48583 - DNA, 30 bp, Artificial Sequence; identical to SEQ ID NO: 4882
  Description of Artificial Sequence: Synthetic casein; inner sequence

SEQ ID NO: 48584 - DNA, 30 bp, Artificial Sequence; identical to SEQ ID NO: 12958
  Description of Artificial Sequence: Synthetic casein; inner sequence

SEQ ID NO: 48585 - DNA, 30 bp, Artificial Sequence; identical to SEQ ID NO: 65
  Description of Artificial Sequence: Synthetic casein; inner sequence

SEQ ID NO: 48586 - DNA, 30 bp, Artificial Sequence; identical to SEQ ID NO: 44549
  Description of Artificial Sequence: Synthetic casein; inner sequence

SEQ ID NO: 48587 - DNA, 30 bp, Artificial Sequence
  Description of Artificial Sequence: Synthetic casein; inner sequence
gcatcgcatgcgtcacgtcctcaccgtgcc

SEQ ID NO: 48588 - DNA, 30 bp, Artificial Sequence; identical to SEQ ID NO: 57
  Description of Artificial Sequence: Synthetic casein; inner sequence

SEQ ID NO: 48589 - DNA, 30 bp, Artificial Sequence; identical to SEQ ID NO: 44843
  Description of Artificial Sequence: Synthetic casein; inner sequence

SEQ ID NO: 48590 - DNA, 30 bp, Artificial Sequence; identical to SEQ ID NO: 44662
  Description of Artificial Sequence: Synthetic casein; inner sequence

SEQ ID NO: 48591 - DNA, 30 bp, Artificial Sequence; identical to SEQ ID NO: 28705
  Description of Artificial Sequence: Synthetic casein; inner sequence

SEQ ID NO: 48592 - DNA, 30 bp, Artificial Sequence; identical to SEQ ID NO: 4272
  Description of Artificial Sequence: Synthetic casein; inner sequence

SEQ ID NO: 48593 - DNA, 30 bp, Artificial Sequence
  Description of Artificial Sequence: Synthetic casein; inner sequence
gcgtacacgtcacacgcatgccacgtcacg

SEQ ID NO: 48594 - DNA, 30 bp, Artificial Sequence; identical to SEQ ID NO: 20666
  Description of Artificial Sequence: Synthetic casein; inner sequence

SEQ ID NO: 48595 - DNA, 30 bp, Artificial Sequence; identical to SEQ ID NO: 44939
  Description of Artificial Sequence: Synthetic casein; inner sequence

SEQ ID NO: 48596 - DNA, 30 bp, Artificial Sequence
  Description of Artificial Sequence: Synthetic casein; inner sequence
gcgtgatggcgtaacgtccgacactgcaca

SEQ ID NO: 48597 - DNA, 30 bp, Artificial Sequence
  Description of Artificial Sequence: Synthetic casein; inner sequence
gcgtacggcacgacgatgatgcactacgtg

SEQ ID NO: 48598 - DNA, 30 bp, Artificial Sequence; identical to SEQ ID NO: 331
  Description of Artificial Sequence: Synthetic casein; inner sequence

SEQ ID NO: 48599 - DNA, 30 bp, Artificial Sequence; identical to SEQ ID NO: 44620
  Description of Artificial Sequence: Synthetic casein; inner sequence

SEQ ID NO: 48600 - DNA, 30 bp, Artificial Sequence; identical to SEQ ID NO: 12892
  Description of Artificial Sequence: Synthetic casein; inner sequence

SEQ ID NO: 48601 - DNA, 30 bp, Artificial Sequence; identical to SEQ ID NO: 20661
  Description of Artificial Sequence: Synthetic casein; inner sequence

SEQ ID NO: 48602 - DNA, 30 bp, Artificial Sequence; identical to SEQ ID NO: 452
  Description of Artificial Sequence: Synthetic casein; inner sequence

SEQ ID NO: 48603 - DNA, 30 bp, Artificial Sequence; identical to SEQ ID NO: 406
  Description of Artificial Sequence: Synthetic casein; inner sequence

SEQ ID NO: 48604 - DNA, 25 bp, Artificial Sequence
  Description of Artificial Sequence: Synthetic casein; inner sequence
ggcatgcacgcacctacacgtgggc

SEQ ID NO: 48605 - DNA, 30 bp, Artificial Sequence; identical to SEQ ID NO: 44552
  Description of Artificial Sequence: Synthetic casein; inner sequence

SEQ ID NO: 48606 - DNA, 30 bp, Artificial Sequence; identical to SEQ ID NO: 44668
  Description of Artificial Sequence: Synthetic casein; inner sequence

SEQ ID NO: 48607 - DNA, 30 bp, Artificial Sequence; identical to SEQ ID NO: 28737
  Description of Artificial Sequence: Synthetic casein; inner sequence

SEQ ID NO: 48608 - DNA, 30 bp, Artificial Sequence
  Description of Artificial Sequence: Synthetic casein; inner sequence
caacgcaacgcatggtgacgtattgccgtg

SEQ ID NO: 48609 - DNA, 30 bp, Artificial Sequence; identical to SEQ ID NO: 32193
  Description of Artificial Sequence: Synthetic casein; inner sequence

SEQ ID NO: 48610 - DNA, 30 bp, Artificial Sequence; identical to SEQ ID NO: 16605
  Description of Artificial Sequence: Synthetic casein; inner sequence

SEQ ID NO: 48611 - DNA, 30 bp, Artificial Sequence; identical to SEQ ID NO: 44768
  Description of Artificial Sequence: Synthetic casein; inner sequence

SEQ ID NO: 48612 - DNA, 30 bp, Artificial Sequence
  Description of Artificial Sequence: Synthetic casein; inner sequence
gtcatgcacgcaccctatcatgtaggcatg

SEQ ID NO: 48613 - DNA, 30 bp, Artificial Sequence
  Description of Artificial Sequence: Synthetic casein; inner sequence
cgaacgcacactgcacgccactacgtcacg

SEQ ID NO: 48614 - DNA, 30 bp, Artificial Sequence; identical to SEQ ID NO: 477
  Description of Artificial Sequence: Synthetic casein; inner sequence

SEQ ID NO: 48615 - DNA, 30 bp, Artificial Sequence; identical to SEQ ID NO: 44711
  Description of Artificial Sequence: Synthetic casein; inner sequence

SEQ ID NO: 48616 - DNA, 28 bp, Artificial Sequence
  Description of Artificial Sequence: Synthetic casein; inner sequence
ggacgcaacgcaccgtatcgtggccatg

SEQ ID NO: 48617 - DNA, 30 bp, Artificial Sequence; identical to SEQ ID NO: 20515
  Description of Artificial Sequence: Synthetic casein; inner sequence

SEQ ID NO: 48618 - DNA, 30 bp, Artificial Sequence; identical to SEQ ID NO: 28791
  Description of Artificial Sequence: Synthetic casein; inner sequence

SEQ ID NO: 48619 - DNA, 30 bp, Artificial Sequence; identical to SEQ ID NO: 20286
  Description of Artificial Sequence: Synthetic casein; inner sequence

SEQ ID NO: 48620 - DNA, 30 bp, Artificial Sequence; identical to SEQ ID NO: 132
  Description of Artificial Sequence: Synthetic casein; inner sequence

SEQ ID NO: 48621 - DNA, 30 bp, Artificial Sequence; identical to SEQ ID NO: 20982
  Description of Artificial Sequence: Synthetic casein; inner sequence

SEQ ID NO: 48622 - DNA, 30 bp, Artificial Sequence
  Description of Artificial Sequence: Synthetic casein; inner sequence
cgtaccgcaggcatacgtgacgtcaacgca

SEQ ID NO: 48623 - DNA, 30 bp, Artificial Sequence; identical to SEQ ID NO: 8798
  Description of Artificial Sequence: Synthetic casein; inner sequence

SEQ ID NO: 48624 - DNA, 30 bp, Artificial Sequence; identical to SEQ ID NO: 20793
  Description of Artificial Sequence: Synthetic casein; inner sequence

SEQ ID NO: 48625 - DNA, 30 bp, Artificial Sequence; identical to SEQ ID NO: 324
  Description of Artificial Sequence: Synthetic casein; inner sequence

SEQ ID NO: 48626 - DNA, 30 bp, Artificial Sequence; identical to SEQ ID NO: 44903
  Description of Artificial Sequence: Synthetic casein; inner sequence

SEQ ID NO: 48627 - DNA, 30 bp, Artificial Sequence; identical to SEQ ID NO: 20576
  Description of Artificial Sequence: Synthetic casein; inner sequence

SEQ ID NO: 48628 - DNA, 30 bp, Artificial Sequence; identical to SEQ ID NO: 44249
  Description of Artificial Sequence: Synthetic casein; inner sequence

SEQ ID NO: 48629 - DNA, 30 bp, Artificial Sequence; identical to SEQ ID NO: 16744
  Description of Artificial Sequence: Synthetic casein; inner sequence

SEQ ID NO: 48630 - DNA, 30 bp, Artificial Sequence
  Description of Artificial Sequence: Synthetic casein; inner sequence
gtcgcgatgaccgtcagtacgcacgtcagc

SEQ ID NO: 48631 - DNA, 30 bp, Artificial Sequence; identical to SEQ ID NO: 171
  Description of Artificial Sequence: Synthetic casein; inner sequence

SEQ ID NO: 48632 - DNA, 30 bp, Artificial Sequence; identical to SEQ ID NO: 28307
  Description of Artificial Sequence: Synthetic casein; inner sequence

SEQ ID NO: 48633 - DNA, 30 bp, Artificial Sequence; identical to SEQ ID NO: 28844
  Description of Artificial Sequence: Synthetic casein; inner sequence

SEQ ID NO: 48634 - DNA, 30 bp, Artificial Sequence; identical to SEQ ID NO: 12985
  Description of Artificial Sequence: Synthetic casein; inner sequence

SEQ ID NO: 48635 - DNA, 30 bp, Artificial Sequence; identical to SEQ ID NO: 28704
  Description of Artificial Sequence: Synthetic casein; inner sequence

SEQ ID NO: 48636 - DNA, 30 bp, Artificial Sequence; identical to SEQ ID NO: 12922
  Description of Artificial Sequence: Synthetic casein; inner sequence

SEQ ID NO: 48637 - DNA, 30 bp, Artificial Sequence; identical to SEQ ID NO: 5001
  Description of Artificial Sequence: Synthetic casein; inner sequence

SEQ ID NO: 48638 - DNA, 30 bp, Artificial Sequence; identical to SEQ ID NO: 20692
  Description of Artificial Sequence: Synthetic casein; inner sequence

SEQ ID NO: 48639 - DNA, 30 bp, Artificial Sequence; identical to SEQ ID NO: 20797
  Description of Artificial Sequence: Synthetic casein; inner sequence

SEQ ID NO: 48640 - DNA, 30 bp, Artificial Sequence; identical to SEQ ID NO: 697
  Description of Artificial Sequence: Synthetic casein; inner sequence

SEQ ID NO: 48641 - DNA, 32 bp, Artificial Sequence
  Description of Artificial Sequence: Synthetic casein; inner sequence
gcacgactcgcaccctatcatgaggccatgtg

SEQ ID NO: 48642 - DNA, 30 bp, Artificial Sequence; identical to SEQ ID NO: 4469
  Description of Artificial Sequence: Synthetic casein; inner sequence

SEQ ID NO: 48643 - DNA, 30 bp, Artificial Sequence; identical to SEQ ID NO: 44602
  Description of Artificial Sequence: Synthetic casein; inner sequence

SEQ ID NO: 48644 - DNA, 30 bp, Artificial Sequence; identical to SEQ ID NO: 4694
  Description of Artificial Sequence: Synthetic casein; inner sequence

SEQ ID NO: 48645 - DNA, 28 bp, Artificial Sequence
  Description of Artificial Sequence: Synthetic casein; inner sequence
gtacgcaacgtaccgtatcgtggccatg

SEQ ID NO: 48646 - DNA, 30 bp, Artificial Sequence; identical to SEQ ID NO: 44991
  Description of Artificial Sequence: Synthetic casein; inner sequence

SEQ ID NO: 48647 - DNA, 30 bp, Artificial Sequence; identical to SEQ ID NO: 20307
  Description of Artificial Sequence: Synthetic casein; inner sequence

SEQ ID NO: 48648 - DNA, 30 bp, Artificial Sequence; identical to SEQ ID NO: 44937
  Description of Artificial Sequence: Synthetic casein; inner sequence

SEQ ID NO: 48649 - DNA, 30 bp, Artificial Sequence
  Description of Artificial Sequence: Synthetic casein; inner sequence
cggtgtgacggcatcgtgacgtactgcgca

SEQ ID NO: 48650 - DNA, 29 bp, Artificial Sequence
  Description of Artificial Sequence: Synthetic casein; inner sequence
gtcatgccatcccttcgagtgtgacggta

SEQ ID NO: 48651 - DNA, 30 bp, Artificial Sequence; identical to SEQ ID NO: 44924
  Description of Artificial Sequence: Synthetic casein; inner sequence

SEQ ID NO: 48652 - DNA, 30 bp, Artificial Sequence; identical to SEQ ID NO: 20773
  Description of Artificial Sequence: Synthetic casein; inner sequence

SEQ ID NO: 48653 - DNA, 30 bp, Artificial Sequence; identical to SEQ ID NO: 100
  Description of Artificial Sequence: Synthetic casein; inner sequence

SEQ ID NO: 48654 - DNA, 30 bp, Artificial Sequence; identical to SEQ ID NO: 20372
  Description of Artificial Sequence: Synthetic casein; inner sequence

SEQ ID NO: 48655 - DNA, 30 bp, Artificial Sequence; identical to SEQ ID NO: 29000
  Description of Artificial Sequence: Synthetic casein; inner sequence

SEQ ID NO: 48656 - DNA, 30 bp, Artificial Sequence
  Description of Artificial Sequence: Synthetic casein; inner sequence
gcgatgggacgttacgtacggtacgccaca

SEQ ID NO: 48657 - DNA, 30 bp, Artificial Sequence; identical to SEQ ID NO: 16950
  Description of Artificial Sequence: Synthetic casein; inner sequence

SEQ ID NO: 48658 - DNA, 30 bp, Artificial Sequence; identical to SEQ ID NO: 32190
  Description of Artificial Sequence: Synthetic casein; inner sequence

SEQ ID NO: 48659 - DNA, 30 bp, Artificial Sequence; identical to SEQ ID NO: 28846
  Description of Artificial Sequence: Synthetic casein; inner sequence

SEQ ID NO: 48660 - DNA, 28 bp, Artificial Sequence
  Description of Artificial Sequence: Synthetic casein; inner sequence
ggacgcaacgtgtgcaatgttgtacgca

SEQ ID NO: 48661 - DNA, 30 bp, Artificial Sequence; identical to SEQ ID NO: 96
  Description of Artificial Sequence: Synthetic casein; inner sequence

SEQ ID NO: 48662 - DNA, 30 bp, Artificial Sequence
  Description of Artificial Sequence: Synthetic casein; inner sequence
gacgacaacgtaccgccatgttacgtcacg

SEQ ID NO: 48663 - DNA, 30 bp, Artificial Sequence; identical to SEQ ID NO: 44544
  Description of Artificial Sequence: Synthetic casein; inner sequence

SEQ ID NO: 48664 - DNA, 30 bp, Artificial Sequence; identical to SEQ ID NO: 44499
  Description of Artificial Sequence: Synthetic casein; inner sequence

SEQ ID NO: 48665 - DNA, 30 bp, Artificial Sequence
  Description of Artificial Sequence: Synthetic casein; inner sequence
ggacgcaacgcaacgatacgtgcttacgtg

SEQ ID NO: 48666 - DNA, 30 bp, Artificial Sequence; identical to SEQ ID NO: 332
  Description of Artificial Sequence: Synthetic casein; inner sequence

SEQ ID NO: 48667 - DNA, 29 bp, Artificial Sequence
  Description of Artificial Sequence: Synthetic casein; inner sequence
ggccgaacggaccgacaagtgcgcatgga

SEQ ID NO: 48668 - DNA, 30 bp, Artificial Sequence; identical to SEQ ID NO: 20668
  Description of Artificial Sequence: Synthetic casein; inner sequence

SEQ ID NO: 48669 - DNA, 30 bp, Artificial Sequence; identical to SEQ ID NO: 44917
  Description of Artificial Sequence: Synthetic casein; inner sequence

SEQ ID NO: 48670 - DNA, 30 bp, Artificial Sequence; identical to SEQ ID NO: 8868
  Description of Artificial Sequence: Synthetic casein; inner sequence

SEQ ID NO: 48671 - DNA, 30 bp, Artificial Sequence; identical to SEQ ID NO: 44926
  Description of Artificial Sequence: Synthetic casein; inner sequence

SEQ ID NO: 48672 - DNA, 30 bp, Artificial Sequence; identical to SEQ ID NO: 44379
  Description of Artificial Sequence: Synthetic casein; inner sequence

SEQ ID NO: 48673 - DNA, 30 bp, Artificial Sequence; identical to SEQ ID NO: 32074
  Description of Artificial Sequence: Synthetic casein; inner sequence

SEQ ID NO: 48674 - DNA, 30 bp, Artificial Sequence; identical to SEQ ID NO: 44556
  Description of Artificial Sequence: Synthetic casein; inner sequence

SEQ ID NO: 48675 - DNA, 30 bp, Artificial Sequence; identical to SEQ ID NO: 603
  Description of Artificial Sequence: Synthetic casein; inner sequence

SEQ ID NO: 48676 - DNA, 30 bp, Artificial Sequence
  Description of Artificial Sequence: Synthetic casein; inner sequence
gcgtaacggtacgtatccctgtcgtacgca

SEQ ID NO: 48677 - DNA, 30 bp, Artificial Sequence
  Description of Artificial Sequence: Synthetic casein; inner sequence
gcgtacacgtgcatcgtcttcgcgcacacg

SEQ ID NO: 48678 - DNA, 30 bp, Artificial Sequence; identical to SEQ ID NO: 44849
  Description of Artificial Sequence: Synthetic casein; inner sequence

SEQ ID NO: 48679 - DNA, 30 bp, Artificial Sequence; identical to SEQ ID NO: 44935
  Description of Artificial Sequence: Synthetic casein; inner sequence

SEQ ID NO: 48680 - DNA, 30 bp, Artificial Sequence; identical to SEQ ID NO: 48
  Description of Artificial Sequence: Synthetic casein; inner sequence

SEQ ID NO: 48681 - DNA, 30 bp, Artificial Sequence
  Description of Artificial Sequence: Synthetic casein; inner sequence
cgcgtcagcacgtgatggtacgtacgcaca

SEQ ID NO: 48682 - DNA, 30 bp, Artificial Sequence; identical to SEQ ID NO: 16799
  Description of Artificial Sequence: Synthetic casein; inner sequence

SEQ ID NO: 48683 - DNA, 30 bp, Artificial Sequence
  Description of Artificial Sequence: Synthetic casein; inner sequence
cgtgtccacgcaacatgtgtacgttacgca

SEQ ID NO: 48684 - DNA, 30 bp, Artificial Sequence
  Description of Artificial Sequence: Synthetic casein; inner sequence
ggacgcaacgtaccgtatcttggccatgtg

SEQ ID NO: 48685 - DNA, 30 bp, Artificial Sequence; identical to SEQ ID NO: 28672
  Description of Artificial Sequence: Synthetic casein; inner sequence

SEQ ID NO: 48686 - DNA, 30 bp, Artificial Sequence
  Description of Artificial Sequence: Synthetic casein; inner sequence
gcactgtgtgtcgtaccgtcctgctgcacg

SEQ ID NO: 48687 - DNA, 30 bp, Artificial Sequence
  Description of Artificial Sequence: Synthetic casein; inner sequence
gacgtgacgcataccgtatgtacgttgtgc

SEQ ID NO: 48688 - DNA, 30 bp, Artificial Sequence; identical to SEQ ID NO: 28818
  Description of Artificial Sequence: Synthetic casein; inner sequence

SEQ ID NO: 48689 - DNA, 30 bp, Artificial Sequence; identical to SEQ ID NO: 486
  Description of Artificial Sequence: Synthetic casein; inner sequence

SEQ ID NO: 48690 - DNA, 30 bp, Artificial Sequence; identical to SEQ ID NO: 44947
  Description of Artificial Sequence: Synthetic casein; inner sequence

SEQ ID NO: 48691 - DNA, 30 bp, Artificial Sequence
  Description of Artificial Sequence: Synthetic casein; inner sequence
gacgtgccagcgtgacgtatggcatgcatc

SEQ ID NO: 48692 - DNA, 30 bp, Artificial Sequence; identical to SEQ ID NO: 44677
  Description of Artificial Sequence: Synthetic casein; inner sequence

SEQ ID NO: 48693 - DNA, 30 bp, Artificial Sequence
  Description of Artificial Sequence: Synthetic casein; inner sequence
ggacgcaacgtaccgtatcgtggtcacgta

SEQ ID NO: 48694 - DNA, 30 bp, Artificial Sequence; identical to SEQ ID NO: 44898
  Description of Artificial Sequence: Synthetic casein; inner sequence

SEQ ID NO: 48695 - DNA, 30 bp, Artificial Sequence
  Description of Artificial Sequence: Synthetic casein; inner sequence
acgtcatgacgtactgcgcatcacgacacg

SEQ ID NO: 48696 - DNA, 30 bp, Artificial Sequence
  Description of Artificial Sequence: Synthetic casein; inner sequence
gcacgactcgcaccctatcatgtcggcatg

SEQ ID NO: 48697 - DNA, 30 bp, Artificial Sequence; identical to SEQ ID NO: 788
  Description of Artificial Sequence: Synthetic casein; inner sequence

SEQ ID NO: 48698 - DNA, 30 bp, Artificial Sequence
  Description of Artificial Sequence: Synthetic casein; inner sequence
ggacgcaaagtaccgtatcgtggccatgtg

SEQ ID NO: 48699 - DNA, 30 bp, Artificial Sequence; identical to SEQ ID NO: 294
  Description of Artificial Sequence: Synthetic casein; inner sequence

SEQ ID NO: 48700 - DNA, 30 bp, Artificial Sequence; identical to SEQ ID NO: 28677
  Description of Artificial Sequence: Synthetic casein; inner sequence

SEQ ID NO: 48701 - DNA, 30 bp, Artificial Sequence; identical to SEQ ID NO: 44726
  Description of Artificial Sequence: Synthetic casein; inner sequence

SEQ ID NO: 48702 - DNA, 30 bp, Artificial Sequence; identical to SEQ ID NO: 44610
  Description of Artificial Sequence: Synthetic casein; inner sequence

SEQ ID NO: 48703 - DNA, 30 bp, Artificial Sequence; identical to SEQ ID NO: 543
  Description of Artificial Sequence: Synthetic casein; inner sequence

SEQ ID NO: 48704 - DNA, 29 bp, Artificial Sequence
  Description of Artificial Sequence: Synthetic casein; inner sequence
ggacgccgatgccctcatgtggccgtgga

SEQ ID NO: 48705 - DNA, 30 bp, Artificial Sequence; identical to SEQ ID NO: 20367
  Description of Artificial Sequence: Synthetic casein; inner sequence

SEQ ID NO: 48706 - DNA, 30 bp, Artificial Sequence
  Description of Artificial Sequence: Synthetic casein; inner sequence
ggacgcaacggaccgtatcgtggccatgtg

SEQ ID NO: 48707 - DNA, 30 bp, Artificial Sequence; identical to SEQ ID NO: 44636
  Description of Artificial Sequence: Synthetic casein; inner sequence

SEQ ID NO: 48708 - DNA, 30 bp, Artificial Sequence; identical to SEQ ID NO: 12767
  Description of Artificial Sequence: Synthetic casein; inner sequence

SEQ ID NO: 48709 - DNA, 30 bp, Artificial Sequence
  Description of Artificial Sequence: Synthetic casein; inner sequence
gcaacgccacgtacacgtccttgcctcacg

SEQ ID NO: 48710 - DNA, 30 bp, Artificial Sequence; identical to SEQ ID NO: 44745
  Description of Artificial Sequence: Synthetic casein; inner sequence

SEQ ID NO: 48711 - DNA, 30 bp, Artificial Sequence; identical to SEQ ID NO: 20923
  Description of Artificial Sequence: Synthetic casein; inner sequence

SEQ ID NO: 48712 - DNA, 30 bp, Artificial Sequence; identical to SEQ ID NO: 285
  Description of Artificial Sequence: Synthetic casein; inner sequence

SEQ ID NO: 48713 - DNA, 30 bp, Artificial Sequence; identical to SEQ ID NO: 28884
  Description of Artificial Sequence: Synthetic casein; inner sequence

SEQ ID NO: 48714 - DNA, 30 bp, Artificial Sequence; identical to SEQ ID NO: 16770
  Description of Artificial Sequence: Synthetic casein; inner sequence

SEQ ID NO: 48715 - DNA, 30 bp, Artificial Sequence; identical to SEQ ID NO: 20669
  Description of Artificial Sequence: Synthetic casein; inner sequence

SEQ ID NO: 48716 - DNA, 30 bp, Artificial Sequence
  Description of Artificial Sequence: Synthetic casein; inner sequence
ggccacagcgtacctcaacgtggacatgca

SEQ ID NO: 48717 - DNA, 30 bp, Artificial Sequence; identical to SEQ ID NO: 44805
  Description of Artificial Sequence: Synthetic casein; inner sequence

SEQ ID NO: 48718 - DNA, 30 bp, Artificial Sequence
  Description of Artificial Sequence: Synthetic casein; inner sequence
cgatacgtacgtagcatgcgatgtgacgca

SEQ ID NO: 48719 - DNA, 30 bp, Artificial Sequence; identical to SEQ ID NO: 20410
  Description of Artificial Sequence: Synthetic casein; inner sequence

SEQ ID NO: 48720 - DNA, 30 bp, Artificial Sequence
  Description of Artificial Sequence: Synthetic casein; inner sequence
gcattacgcagccatacgcctcgatgcacg

SEQ ID NO: 48721 - DNA, 30 bp, Artificial Sequence; identical to SEQ ID NO: 44739
  Description of Artificial Sequence: Synthetic casein; inner sequence

SEQ ID NO: 48722 - DNA, 30 bp, Artificial Sequence; identical to SEQ ID NO: 44663
  Description of Artificial Sequence: Synthetic casein; inner sequence

SEQ ID NO: 48723 - DNA, 30 bp, Artificial Sequence; identical to SEQ ID NO: 44642
  Description of Artificial Sequence: Synthetic casein; inner sequence

SEQ ID NO: 48724 - DNA, 30 bp, Artificial Sequence
  Description of Artificial Sequence: Synthetic casein; inner sequence
gcaacacagcgttacgtacgacacgacacc

SEQ ID NO: 48725 - DNA, 30 bp, Artificial Sequence; identical to SEQ ID NO: 44936
  Description of Artificial Sequence: Synthetic casein; inner sequence

SEQ ID NO: 48726 - DNA, 30 bp, Artificial Sequence
  Description of Artificial Sequence: Synthetic casein; inner sequence
gatgcgtacgtcacgtcgtagtgctgcgcg

SEQ ID NO: 48727 - DNA, 30 bp, Artificial Sequence
  Description of Artificial Sequence: Synthetic casein; inner sequence
cgcgatgaggtgacgtgccttccgtacgcg

SEQ ID NO: 48728 - DNA, 30 bp, Artificial Sequence; identical to SEQ ID NO: 20644
  Description of Artificial Sequence: Synthetic casein; inner sequence

SEQ ID NO: 48729 - DNA, 30 bp, Artificial Sequence
  Description of Artificial Sequence: Synthetic casein; inner sequence
acgtgtgccgcgcaacgtgatgtgtgcaca

SEQ ID NO: 48730 - DNA, 30 bp, Artificial Sequence; identical to SEQ ID NO: 20807
  Description of Artificial Sequence: Synthetic casein; inner sequence

SEQ ID NO: 48731 - DNA, 30 bp, Artificial Sequence; identical to SEQ ID NO: 12945
  Description of Artificial Sequence: Synthetic casein; inner sequence

SEQ ID NO: 48732 - DNA, 30 bp, Artificial Sequence; identical to SEQ ID NO: 44865
  Description of Artificial Sequence: Synthetic casein; inner sequence

SEQ ID NO: 48733 - DNA, 30 bp, Artificial Sequence; identical to SEQ ID NO: 44879
  Description of Artificial Sequence: Synthetic casein; inner sequence

SEQ ID NO: 48734 - DNA, 30 bp, Artificial Sequence; identical to SEQ ID NO: 129
  Description of Artificial Sequence: Synthetic casein; inner sequence

SEQ ID NO: 48735 - DNA, 30 bp, Artificial Sequence; identical to SEQ ID NO: 44723
  Description of Artificial Sequence: Synthetic casein; inner sequence

SEQ ID NO: 48736 - DNA, 30 bp, Artificial Sequence; identical to SEQ ID NO: 576
  Description of Artificial Sequence: Synthetic casein; inner sequence

SEQ ID NO: 48737 - DNA, 30 bp, Artificial Sequence
  Description of Artificial Sequence: Synthetic casein; inner sequence
gtcatgcacgaacactatcatggccgcatg

SEQ ID NO: 48738 - DNA, 30 bp, Artificial Sequence; identical to SEQ ID NO: 20502
  Description of Artificial Sequence: Synthetic casein; inner sequence

SEQ ID NO: 48739 - DNA, 30 bp, Artificial Sequence
  Description of Artificial Sequence: Synthetic casein; inner sequence
cgatacgccatgatgtccgtgatctgcacg

SEQ ID NO: 48740 - DNA, 30 bp, Artificial Sequence; identical to SEQ ID NO: 789
  Description of Artificial Sequence: Synthetic casein; inner sequence

SEQ ID NO: 48741 - DNA, 29 bp, Artificial Sequence
  Description of Artificial Sequence: Synthetic casein; inner sequence
acgtgtgcggaacgtgtgtgccatacgca

SEQ ID NO: 48742 - DNA, 28 bp, Artificial Sequence
  Description of Artificial Sequence: Synthetic casein; inner sequence
ggacgcaacgtaccgcatcgtggccatg

SEQ ID NO: 48743 - DNA, 30 bp, Artificial Sequence; identical to SEQ ID NO: 4918
  Description of Artificial Sequence: Synthetic casein; inner sequence

SEQ ID NO: 48744 - DNA, 30 bp, Artificial Sequence; identical to SEQ ID NO: 20820
  Description of Artificial Sequence: Synthetic casein; inner sequence

SEQ ID NO: 48745 - DNA, 30 bp, Artificial Sequence; identical to SEQ ID NO: 32619
  Description of Artificial Sequence: Synthetic casein; inner sequence

SEQ ID NO: 48746 - DNA, 30 bp, Artificial Sequence
  Description of Artificial Sequence: Synthetic casein; inner sequence
cgtatggcaggcacgtcacgtatgcgtggt

SEQ ID NO: 48747 - DNA, 30 bp, Artificial Sequence; identical to SEQ ID NO: 28329
  Description of Artificial Sequence: Synthetic casein; inner sequence

SEQ ID NO: 48748 - DNA, 30 bp, Artificial Sequence; identical to SEQ ID NO: 44845
  Description of Artificial Sequence: Synthetic casein; inner sequence

SEQ ID NO: 48749 - DNA, 30 bp, Artificial Sequence; identical to SEQ ID NO: 991
  Description of Artificial Sequence: Synthetic casein; inner sequence

SEQ ID NO: 48750 - DNA, 30 bp, Artificial Sequence; identical to SEQ ID NO: 853
  Description of Artificial Sequence: Synthetic casein; inner sequence

SEQ ID NO: 48751 - DNA, 30 bp, Artificial Sequence; identical to SEQ ID NO: 20853
  Description of Artificial Sequence: Synthetic casein; inner sequence

SEQ ID NO: 48752 - DNA, 30 bp, Artificial Sequence
  Description of Artificial Sequence: Synthetic casein; inner sequence
acgtcacgtcacgtaggtatggctgacgcg

SEQ ID NO: 48753 - DNA, 30 bp, Artificial Sequence; identical to SEQ ID NO: 88
  Description of Artificial Sequence: Synthetic casein; inner sequence

SEQ ID NO: 48754 - DNA, 30 bp, Artificial Sequence; identical to SEQ ID NO: 16698
  Description of Artificial Sequence: Synthetic casein; inner sequence

SEQ ID NO: 48755 - DNA, 30 bp, Artificial Sequence; identical to SEQ ID NO: 754
  Description of Artificial Sequence: Synthetic casein; inner sequence

SEQ ID NO: 48756 - DNA, 30 bp, Artificial Sequence; identical to SEQ ID NO: 44771
  Description of Artificial Sequence: Synthetic casein; inner sequence

SEQ ID NO: 48757 - DNA, 30 bp, Artificial Sequence
  Description of Artificial Sequence: Synthetic casein; inner sequence
cgtacgcacacggaccgcatgtaccgcatg

SEQ ID NO: 48758 - DNA, 30 bp, Artificial Sequence; identical to SEQ ID NO: 159
  Description of Artificial Sequence: Synthetic casein; inner sequence

SEQ ID NO: 48759 - DNA, 30 bp, Artificial Sequence; identical to SEQ ID NO: 32484
  Description of Artificial Sequence: Synthetic casein; inner sequence

SEQ ID NO: 48760 - DNA, 30 bp, Artificial Sequence; identical to SEQ ID NO: 44733
  Description of Artificial Sequence: Synthetic casein; inner sequence

SEQ ID NO: 48761 - DNA, 30 bp, Artificial Sequence; identical to SEQ ID NO: 20976
  Description of Artificial Sequence: Synthetic casein; inner sequence

SEQ ID NO: 48762 - DNA, 30 bp, Artificial Sequence; identical to SEQ ID NO: 8985
  Description of Artificial Sequence: Synthetic casein; inner sequence

SEQ ID NO: 48763 - DNA, 30 bp, Artificial Sequence; identical to SEQ ID NO: 44907
  Description of Artificial Sequence: Synthetic casein; inner sequence

SEQ ID NO: 48764 - DNA, 30 bp, Artificial Sequence
  Description of Artificial Sequence: Synthetic casein; inner sequence
cgacagcatggcgaggtacgcaacgtcacg

SEQ ID NO: 48765 - DNA, 30 bp, Artificial Sequence; identical to SEQ ID NO: 497
  Description of Artificial Sequence: Synthetic casein; inner sequence

SEQ ID NO: 48766 - DNA, 30 bp, Artificial Sequence; identical to SEQ ID NO: 840
  Description of Artificial Sequence: Synthetic casein; inner sequence

SEQ ID NO: 48767 - DNA, 30 bp, Artificial Sequence
  Description of Artificial Sequence: Synthetic casein; inner sequence
gcgatgcgacaacgatgtccgtgctgtacg

SEQ ID NO: 48768 - DNA, 30 bp, Artificial Sequence; identical to SEQ ID NO: 32084
  Description of Artificial Sequence: Synthetic casein; inner sequence

SEQ ID NO: 48769 - DNA, 30 bp, Artificial Sequence; identical to SEQ ID NO: 512
  Description of Artificial Sequence: Synthetic casein; inner sequence

SEQ ID NO: 48770 - DNA, 30 bp, Artificial Sequence; identical to SEQ ID NO: 4517
  Description of Artificial Sequence: Synthetic casein; inner sequence

SEQ ID NO: 48771 - DNA, 30 bp, Artificial Sequence
  Description of Artificial Sequence: Synthetic casein; inner sequence
tgcgttacgtacgcatgcctcgacgtcacg

SEQ ID NO: 48772 - DNA, 30 bp, Artificial Sequence; identical to SEQ ID NO: 44782
  Description of Artificial Sequence: Synthetic casein; inner sequence

SEQ ID NO: 48773 - DNA, 30 bp, Artificial Sequence
  Description of Artificial Sequence: Synthetic casein; inner sequence
gcgatacgcgatcacaccttccgttgcacg

SEQ ID NO: 48774 - DNA, 30 bp, Artificial Sequence
  Description of Artificial Sequence: Synthetic casein; inner sequence
acgtgcacagcatgcgttcgatccgtcacg

SEQ ID NO: 48775 - DNA, 30 bp, Artificial Sequence; identical to SEQ ID NO: 32136
  Description of Artificial Sequence: Synthetic casein; inner sequence

SEQ ID NO: 48776 - DNA, 30 bp, Artificial Sequence
  Description of Artificial Sequence: Synthetic casein; inner sequence
gcatgaggacgtgacggaacggtgtgcgtg

SEQ ID NO: 48777 - DNA, 30 bp, Artificial Sequence
  Description of Artificial Sequence: Synthetic casein; inner sequence
gtcatgcacgatcactatcatggcggcatg

SEQ ID NO: 48778 - DNA, 30 bp, Artificial Sequence; identical to SEQ ID NO: 920
  Description of Artificial Sequence: Synthetic casein; inner sequence

SEQ ID NO: 48779 - DNA, 30 bp, Artificial Sequence; identical to SEQ ID NO: 685
  Description of Artificial Sequence: Synthetic casein; inner sequence

SEQ ID NO: 48780 - DNA, 30 bp, Artificial Sequence
  Description of Artificial Sequence: Synthetic casein; inner sequence
ggcatgcgatgtacgaggcatgatgcgtca

SEQ ID NO: 48781 - DNA, 30 bp, Artificial Sequence
  Description of Artificial Sequence: Synthetic casein; inner sequence
cacgtaccagcgcatgtccgacacgtcacg

SEQ ID NO: 48782 - DNA, 30 bp, Artificial Sequence
  Description of Artificial Sequence: Synthetic casein; inner sequence
cgtgtggcacgacaacacgttccgtccacg

SEQ ID NO: 48783 - DNA, 30 bp, Artificial Sequence
  Description of Artificial Sequence: Synthetic casein; inner sequence
gccctgcacgcaccctatcatgtaggcatg

SEQ ID NO: 48784 - DNA, 30 bp, Artificial Sequence
  Description of Artificial Sequence: Synthetic casein; inner sequence
gcacgtacggacgatgcgtgtgccttcgca

SEQ ID NO: 48785 - DNA, 30 bp, Artificial Sequence; identical to SEQ ID NO: 44820
  Description of Artificial Sequence: Synthetic casein; inner sequence

SEQ ID NO: 48786 - DNA, 30 bp, Artificial Sequence
  Description of Artificial Sequence: Synthetic casein; inner sequence
gcacgactcgcaccctatcatgtagccatg

SEQ ID NO: 48787 - DNA, 30 bp, Artificial Sequence
  Description of Artificial Sequence: Synthetic casein; inner sequence
agcgtgcatgctcacgtgacgtactgcgtg

SEQ ID NO: 48788 - DNA, 30 bp, Artificial Sequence; identical to SEQ ID NO: 44637
  Description of Artificial Sequence: Synthetic casein; inner sequence

SEQ ID NO: 48789 - DNA, 30 bp, Artificial Sequence; identical to SEQ ID NO: 580
  Description of Artificial Sequence: Synthetic casein; inner sequence

SEQ ID NO: 48790 - DNA, 30 bp, Artificial Sequence; identical to SEQ ID NO: 4617
  Description of Artificial Sequence: Synthetic casein; inner sequence

SEQ ID NO: 48791 - DNA, 30 bp, Artificial Sequence
  Description of Artificial Sequence: Synthetic casein; inner sequence
acgtcacgttgcatcgtagctgtgtccgcc

SEQ ID NO: 48792 - DNA, 30 bp, Artificial Sequence; identical to SEQ ID NO: 44609
  Description of Artificial Sequence: Synthetic casein; inner sequence

SEQ ID NO: 48793 - DNA, 30 bp, Artificial Sequence; identical to SEQ ID NO: 20899
  Description of Artificial Sequence: Synthetic casein; inner sequence

SEQ ID NO: 48794 - DNA, 30 bp, Artificial Sequence; identical to SEQ ID NO: 44599
  Description of Artificial Sequence: Synthetic casein; inner sequence

SEQ ID NO: 48795 - DNA, 30 bp, Artificial Sequence; identical to SEQ ID NO: 498
  Description of Artificial Sequence: Synthetic casein; inner sequence

SEQ ID NO: 48796 - DNA, 30 bp, Artificial Sequence
  Description of Artificial Sequence: Synthetic casein; inner sequence
cgtgacgtgcgtgcagttacgtgtgccacg

SEQ ID NO: 48797 - DNA, 30 bp, Artificial Sequence; identical to SEQ ID NO: 16726
  Description of Artificial Sequence: Synthetic casein; inner sequence

SEQ ID NO: 48798 - DNA, 30 bp, Artificial Sequence
  Description of Artificial Sequence: Synthetic casein; inner sequence
ggtacgcatcgaccacgcaacacgtgcgca

SEQ ID NO: 48799 - DNA, 30 bp, Artificial Sequence; identical to SEQ ID NO: 16412
  Description of Artificial Sequence: Synthetic casein; inner sequence

SEQ ID NO: 48800 - DNA, 30 bp, Artificial Sequence; identical to SEQ ID NO: 28836
  Description of Artificial Sequence: Synthetic casein; inner sequence

SEQ ID NO: 48801 - DNA, 30 bp, Artificial Sequence; identical to SEQ ID NO: 44834
  Description of Artificial Sequence: Synthetic casein; inner sequence

SEQ ID NO: 48802 - DNA, 30 bp, Artificial Sequence
  Description of Artificial Sequence: Synthetic casein; inner sequence
cgtaccgcacgcagtcgataggcatgcaca

SEQ ID NO: 48803 - DNA, 30 bp, Artificial Sequence; identical to SEQ ID NO: 20533
  Description of Artificial Sequence: Synthetic casein; inner sequence

SEQ ID NO: 48804 - DNA, 30 bp, Artificial Sequence
  Description of Artificial Sequence: Synthetic casein; inner sequence
acgtgtacgtagcatgtcgcgatctgcacg

SEQ ID NO: 48805 - DNA, 30 bp, Artificial Sequence; identical to SEQ ID NO: 923
  Description of Artificial Sequence: Synthetic casein; inner sequence

SEQ ID NO: 48806 - DNA, 30 bp, Artificial Sequence; identical to SEQ ID NO: 717
  Description of Artificial Sequence: Synthetic casein; inner sequence

SEQ ID NO: 48807 - DNA, 30 bp, Artificial Sequence; identical to SEQ ID NO: 32622
  Description of Artificial Sequence: Synthetic casein; inner sequence

SEQ ID NO: 48808 - DNA, 30 bp, Artificial Sequence; identical to SEQ ID NO: 45001
  Description of Artificial Sequence: Synthetic casein; inner sequence

SEQ ID NO: 48809 - DNA, 30 bp, Artificial Sequence; identical to SEQ ID NO: 44487
  Description of Artificial Sequence: Synthetic casein; inner sequence

SEQ ID NO: 48810 - DNA, 30 bp, Artificial Sequence
  Description of Artificial Sequence: Synthetic casein; inner sequence
gacgtgacgcgatcggtacgtgacgttgcg

SEQ ID NO: 48811 - DNA, 30 bp, Artificial Sequence
  Description of Artificial Sequence: Synthetic casein; inner sequence
ggacgcaccgtaccgtatcgtggccatgta

SEQ ID NO: 48812 - DNA, 30 bp, Artificial Sequence
  Description of Artificial Sequence: Synthetic casein; inner sequence
gcacgtgcacatgcctcgtttcgcgtcacg

SEQ ID NO: 48813 - DNA, 30 bp, Artificial Sequence
  Description of Artificial Sequence: Synthetic casein; inner sequence
gacgtgatgcgtgtcgtatgtgccttgtgc

SEQ ID NO: 48814 - DNA, 30 bp, Artificial Sequence; identical to SEQ ID NO: 20736
  Description of Artificial Sequence: Synthetic casein; inner sequence

SEQ ID NO: 48815 - DNA, 30 bp, Artificial Sequence; identical to SEQ ID NO: 44580
  Description of Artificial Sequence: Synthetic casein; inner sequence

SEQ ID NO: 48816 - DNA, 30 bp, Artificial Sequence; identical to SEQ ID NO: 44635
  Description of Artificial Sequence: Synthetic casein; inner sequence

SEQ ID NO: 48817 - DNA, 30 bp, Artificial Sequence
  Description of Artificial Sequence: Synthetic casein; inner sequence
ccatgcatcacgtcgtcacgcagcctcacg

SEQ ID NO: 48818 - DNA, 30 bp, Artificial Sequence; identical to SEQ ID NO: 55
  Description of Artificial Sequence: Synthetic casein; inner sequence

SEQ ID NO: 48819 - DNA, 30 bp, Artificial Sequence; identical to SEQ ID NO: 29
  Description of Artificial Sequence: Synthetic casein; inner sequence

SEQ ID NO: 48820 - DNA, 30 bp, Artificial Sequence
  Description of Artificial Sequence: Synthetic casein; inner sequence
ccatcgcgtcacatggtacggtgcgacacg

SEQ ID NO: 48821 - DNA, 30 bp, Artificial Sequence; identical to SEQ ID NO: 32341
  Description of Artificial Sequence: Synthetic casein; inner sequence

SEQ ID NO: 48822 - DNA, 30 bp, Artificial Sequence
  Description of Artificial Sequence: Synthetic casein; inner sequence
cacgccacatcgtgacatagggcatgcgcg

SEQ ID NO: 48823 - DNA, 30 bp, Artificial Sequence; identical to SEQ ID NO: 553
  Description of Artificial Sequence: Synthetic casein; inner sequence

SEQ ID NO: 48824 - DNA, 30 bp, Artificial Sequence
  Description of Artificial Sequence: Synthetic casein; inner sequence
cacgtcacgcatcagatgtcgcacttcacg

SEQ ID NO: 48825 - DNA, 30 bp, Artificial Sequence; identical to SEQ ID NO: 44732
  Description of Artificial Sequence: Synthetic casein; inner sequence

SEQ ID NO: 48826 - DNA, 30 bp, Artificial Sequence; identical to SEQ ID NO: 16866
  Description of Artificial Sequence: Synthetic casein; inner sequence

SEQ ID NO: 48827 - DNA, 30 bp, Artificial Sequence
  Description of Artificial Sequence: Synthetic casein; inner sequence
gcgatgaagcatgcgtacgtcctgcgcacg

SEQ ID NO: 48828 - DNA, 30 bp, Artificial Sequence
  Description of Artificial Sequence: Synthetic casein; inner sequence
gtcacgcaggacgatgcgatgtgcttcgcg

SEQ ID NO: 48829 - DNA, 30 bp, Artificial Sequence; identical to SEQ ID NO: 20946
  Description of Artificial Sequence: Synthetic casein; inner sequence

SEQ ID NO: 48830 - DNA, 30 bp, Artificial Sequence; identical to SEQ ID NO: 488
  Description of Artificial Sequence: Synthetic casein; inner sequence

SEQ ID NO: 48831 - DNA, 30 bp, Artificial Sequence
  Description of Artificial Sequence: Synthetic casein; inner sequence
gacacgtcacgatgcacgtactacgacacg

SEQ ID NO: 48832 - DNA, 30 bp, Artificial Sequence; identical to SEQ ID NO: 429
  Description of Artificial Sequence: Synthetic casein; inner sequence

SEQ ID NO: 48833 - DNA, 30 bp, Artificial Sequence; identical to SEQ ID NO: 44953
  Description of Artificial Sequence: Synthetic casein; inner sequence

SEQ ID NO: 48834 - DNA, 30 bp, Artificial Sequence; identical to SEQ ID NO: 16561
  Description of Artificial Sequence: Synthetic casein; inner sequence

SEQ ID NO: 48835 - DNA, 30 bp, Artificial Sequence
  Description of Artificial Sequence: Synthetic casein; inner sequence
gccgtgacgatgacgtgttggacatgcacc

SEQ ID NO: 48836 - DNA, 30 bp, Artificial Sequence
  Description of Artificial Sequence: Synthetic casein; inner sequence
gcgtgacatggcaggcacacgttacgcaca

SEQ ID NO: 48837 - DNA, 30 bp, Artificial Sequence
  Description of Artificial Sequence: Synthetic casein; inner sequence
gcatcgtgcagcacgtccactcgatgcacg

SEQ ID NO: 48838 - DNA, 30 bp, Artificial Sequence; identical to SEQ ID NO: 44889
  Description of Artificial Sequence: Synthetic casein; inner sequence

SEQ ID NO: 48839 - DNA, 30 bp, Artificial Sequence; identical to SEQ ID NO: 28595
  Description of Artificial Sequence: Synthetic casein; inner sequence

SEQ ID NO: 48840 - DNA, 30 bp, Artificial Sequence
  Description of Artificial Sequence: Synthetic casein; inner sequence
gcatacgacatcgatacgtaccgctgcacg

SEQ ID NO: 48841 - DNA, 30 bp, Artificial Sequence; identical to SEQ ID NO: 44643
  Description of Artificial Sequence: Synthetic casein; inner sequence

SEQ ID NO: 48842 - DNA, 32 bp, Artificial Sequence
  Description of Artificial Sequence: Synthetic casein; inner sequence
gtcactgtgcctgaccgtcaagttgcggcatg

SEQ ID NO: 48843 - DNA, 30 bp, Artificial Sequence; identical to SEQ ID NO: 20594
  Description of Artificial Sequence: Synthetic casein; inner sequence

SEQ ID NO: 48844 - DNA, 30 bp, Artificial Sequence
  Description of Artificial Sequence: Synthetic casein; inner sequence
gcgtgacgatacgtaccgatgtgatgcgca

SEQ ID NO: 48845 - DNA, 30 bp, Artificial Sequence
  Description of Artificial Sequence: Synthetic casein; inner sequence
gcaacacgatgcaccgtacggatcggcacg

SEQ ID NO: 48846 - DNA, 30 bp, Artificial Sequence
  Description of Artificial Sequence: Synthetic casein; inner sequence
ggacgcaacgtaccgtatcgtggccctgta

SEQ ID NO: 48847 - DNA, 30 bp, Artificial Sequence
  Description of Artificial Sequence: Synthetic casein; inner sequence
gcatacggcacaggcagcacgtacgccacg

SEQ ID NO: 48848 - DNA, 30 bp, Artificial Sequence; identical to SEQ ID NO: 292
  Description of Artificial Sequence: Synthetic casein; inner sequence

SEQ ID NO: 48849 - DNA, 30 bp, Artificial Sequence; identical to SEQ ID NO: 20343
  Description of Artificial Sequence: Synthetic casein; inner sequence

SEQ ID NO: 48850 - DNA, 30 bp, Artificial Sequence; identical to SEQ ID NO: 20690
  Description of Artificial Sequence: Synthetic casein; inner sequence

SEQ ID NO: 48851 - DNA, 30 bp, Artificial Sequence; identical to SEQ ID NO: 16692
  Description of Artificial Sequence: Synthetic casein; inner sequence

SEQ ID NO: 48852 - DNA, 30 bp, Artificial Sequence
  Description of Artificial Sequence: Synthetic casein; inner sequence
cgtgccgaacggatcgtatgacgtgacgca

SEQ ID NO: 48853 - DNA, 30 bp, Artificial Sequence; identical to SEQ ID NO: 20700
  Description of Artificial Sequence: Synthetic casein; inner sequence

SEQ ID NO: 48854 - DNA, 30 bp, Artificial Sequence; identical to SEQ ID NO: 20353
  Description of Artificial Sequence: Synthetic casein; inner sequence

SEQ ID NO: 48855 - DNA, 30 bp, Artificial Sequence; identical to SEQ ID NO: 196
  Description of Artificial Sequence: Synthetic casein; inner sequence

SEQ ID NO: 48856 - DNA, 30 bp, Artificial Sequence
  Description of Artificial Sequence: Synthetic casein; inner sequence
gcacgcaacgtaccgtatcgtggccatgta

SEQ ID NO: 48857 - DNA, 30 bp, Artificial Sequence; identical to SEQ ID NO: 36827
  Description of Artificial Sequence: Synthetic casein; inner sequence

SEQ ID NO: 48858 - DNA, 30 bp, Artificial Sequence
  Description of Artificial Sequence: Synthetic casein; inner sequence
ggacgcaacgtcccgtatcgtggccatgtg

SEQ ID NO: 48859 - DNA, 30 bp, Artificial Sequence; identical to SEQ ID NO: 44901
  Description of Artificial Sequence: Synthetic casein; inner sequence

SEQ ID NO: 48860 - DNA, 30 bp, Artificial Sequence; identical to SEQ ID NO: 8949
  Description of Artificial Sequence: Synthetic casein; inner sequence

SEQ ID NO: 48861 - DNA, 30 bp, Artificial Sequence
  Description of Artificial Sequence: Synthetic casein; inner sequence
cacgtccacacgcgatgcatcacgtacgca

SEQ ID NO: 48862 - DNA, 30 bp, Artificial Sequence
  Description of Artificial Sequence: Synthetic casein; inner sequence
cgtaacgcacgatgcacggtatgtggcaca

SEQ ID NO: 48863 - DNA, 30 bp, Artificial Sequence; identical to SEQ ID NO: 16715
  Description of Artificial Sequence: Synthetic casein; inner sequence

SEQ ID NO: 48864 - DNA, 30 bp, Artificial Sequence
  Description of Artificial Sequence: Synthetic casein; inner sequence
cgtgacacggtgcgtgacgttacctgcgcg

SEQ ID NO: 48865 - DNA, 30 bp, Artificial Sequence; identical to SEQ ID NO: 505
  Description of Artificial Sequence: Synthetic casein; inner sequence

SEQ ID NO: 48866 - DNA, 30 bp, Artificial Sequence
  Description of Artificial Sequence: Synthetic casein; inner sequence
ggacgcatcgtaccgtatcgtggccatgtg

SEQ ID NO: 48867 - DNA, 25 bp, Artificial Sequence
  Description of Artificial Sequence: Synthetic casein; inner sequence
gtcattccgcatcctacacgtgggc

SEQ ID NO: 48868 - DNA, 30 bp, Artificial Sequence; identical to SEQ ID NO: 20974
  Description of Artificial Sequence: Synthetic casein; inner sequence

SEQ ID NO: 48869 - DNA, 30 bp, Artificial Sequence; identical to SEQ ID NO: 28864
  Description of Artificial Sequence: Synthetic casein; inner sequence

SEQ ID NO: 48870 - DNA, 30 bp, Artificial Sequence; identical to SEQ ID NO: 167
  Description of Artificial Sequence: Synthetic casein; inner sequence

SEQ ID NO: 48871 - DNA, 30 bp, Artificial Sequence; identical to SEQ ID NO: 28620
  Description of Artificial Sequence: Synthetic casein; inner sequence

SEQ ID NO: 48872 - DNA, 30 bp, Artificial Sequence
  Description of Artificial Sequence: Synthetic casein; inner sequence
gcgtcaggatggacgtactctcacgtcacg

SEQ ID NO: 48873 - DNA, 30 bp, Artificial Sequence; identical to SEQ ID NO: 28848
  Description of Artificial Sequence: Synthetic casein; inner sequence

SEQ ID NO: 48874 - DNA, 30 bp, Artificial Sequence; identical to SEQ ID NO: 16750
  Description of Artificial Sequence: Synthetic casein; inner sequence

SEQ ID NO: 48875 - DNA, 29 bp, Artificial Sequence
  Description of Artificial Sequence: Synthetic casein; inner sequence
cgtacgacacgacagacatgcacgacgca

SEQ ID NO: 48876 - DNA, 30 bp, Artificial Sequence
  Description of Artificial Sequence: Synthetic casein; inner sequence
cgatgcgcatcgtatcggcacagtgacgcg

SEQ ID NO: 48877 - DNA, 30 bp, Artificial Sequence
  Description of Artificial Sequence: Synthetic casein; inner sequence
ggccacagcgtacctcaacgtggacgtgcg

SEQ ID NO: 48878 - DNA, 30 bp, Artificial Sequence
  Description of Artificial Sequence: Synthetic casein; inner sequence
ggcatgcgatgaacgaggcatgttgcgtca

SEQ ID NO: 48879 - DNA, 30 bp, Artificial Sequence; identical to SEQ ID NO: 44
  Description of Artificial Sequence: Synthetic casein; inner sequence

SEQ ID NO: 48880 - DNA, 30 bp, Artificial Sequence
  Description of Artificial Sequence: Synthetic casein; inner sequence
gcgtcacacgtagcgttacgggacggcacg

SEQ ID NO: 48881 - DNA, 29 bp, Artificial Sequence
  Description of Artificial Sequence: Synthetic casein; inner sequence
gtgcaaacggaccgacaagtgcgcatgga

SEQ ID NO: 48882 - DNA, 30 bp, Artificial Sequence; identical to SEQ ID NO: 185
  Description of Artificial Sequence: Synthetic casein; inner sequence

SEQ ID NO: 48883 - DNA, 29 bp, Artificial Sequence
  Description of Artificial Sequence: Synthetic casein; inner sequence
gcgtgccatcgtacgtatcgcactgtgca

SEQ ID NO: 48884 - DNA, 30 bp, Artificial Sequence; identical to SEQ ID NO: 20913
  Description of Artificial Sequence: Synthetic casein; inner sequence

SEQ ID NO: 48885 - DNA, 30 bp, Artificial Sequence
  Description of Artificial Sequence: Synthetic casein; inner sequence
cgtgttgcacgtactcatgctgccttcgcg

SEQ ID NO: 48886 - DNA, 30 bp, Artificial Sequence
  Description of Artificial Sequence: Synthetic casein; inner sequence
cgacatgtcgcactgaccgtcacgtacacg

SEQ ID NO: 48887 - DNA, 30 bp, Artificial Sequence; identical to SEQ ID NO: 186
  Description of Artificial Sequence: Synthetic casein; inner sequence

SEQ ID NO: 48888 - DNA, 30 bp, Artificial Sequence
  Description of Artificial Sequence: Synthetic casein; inner sequence
cgtacgtacgcaggcacgttcccgttcgtg

SEQ ID NO: 48889 - DNA, 30 bp, Artificial Sequence; identical to SEQ ID NO: 20528
  Description of Artificial Sequence: Synthetic casein; inner sequence

SEQ ID NO: 48890 - DNA, 30 bp, Artificial Sequence
  Description of Artificial Sequence: Synthetic casein; inner sequence
gcgacgtggcgtaacgtatcgtgcttcgtc

SEQ ID NO: 48891 - DNA, 30 bp, Artificial Sequence; identical to SEQ ID NO: 32304
  Description of Artificial Sequence: Synthetic casein; inner sequence

SEQ ID NO: 48892 - DNA, 30 bp, Artificial Sequence
  Description of Artificial Sequence: Synthetic casein; inner sequence
acgtgcaggacgacgtgcgtgacgtacgcc

SEQ ID NO: 48893 - DNA, 30 bp, Artificial Sequence; identical to SEQ ID NO: 44301
  Description of Artificial Sequence: Synthetic casein; inner sequence

SEQ ID NO: 48894 - DNA, 30 bp, Artificial Sequence
  Description of Artificial Sequence: Synthetic casein; inner sequence
acgtgcatgtgacgtgtcgtgcagttcgca

SEQ ID NO: 48895 - DNA, 30 bp, Artificial Sequence
  Description of Artificial Sequence: Synthetic casein; inner sequence
ccgtcacacacaaggcacgtacgttgcacg

SEQ ID NO: 48896 - DNA, 30 bp, Artificial Sequence; identical to SEQ ID NO: 181
  Description of Artificial Sequence: Synthetic casein; inner sequence

SEQ ID NO: 48897 - DNA, 30 bp, Artificial Sequence; identical to SEQ ID NO: 20733
  Description of Artificial Sequence: Synthetic casein; inner sequence

SEQ ID NO: 48898 - DNA, 30 bp, Artificial Sequence; identical to SEQ ID NO: 44688
  Description of Artificial Sequence: Synthetic casein; inner sequence

SEQ ID NO: 48899 - DNA, 30 bp, Artificial Sequence
  Description of Artificial Sequence: Synthetic casein; inner sequence
ggacacagcgtacctcaacgtggacgcgca

SEQ ID NO: 48900 - DNA, 30 bp, Artificial Sequence
  Description of Artificial Sequence: Synthetic casein; inner sequence
gcgatacggcatgaccgttgctacgtcacg

SEQ ID NO: 48901 - DNA, 30 bp, Artificial Sequence
  Description of Artificial Sequence: Synthetic casein; inner sequence
ggacacagcgtacctcaacgtggccgtgca

SEQ ID NO: 48902 - DNA, 30 bp, Artificial Sequence; identical to SEQ ID NO: 168
  Description of Artificial Sequence: Synthetic casein; inner sequence

SEQ ID NO: 48903 - DNA, 30 bp, Artificial Sequence; identical to SEQ ID NO: 103
  Description of Artificial Sequence: Synthetic casein; inner sequence

SEQ ID NO: 48904 - DNA, 30 bp, Artificial Sequence; identical to SEQ ID NO: 28948
  Description of Artificial Sequence: Synthetic casein; inner sequence

SEQ ID NO: 48905 - DNA, 28 bp, Artificial Sequence
  Description of Artificial Sequence: Synthetic casein; inner sequence
gtcatgcacgaacactatcatggcggca

SEQ ID NO: 48906 - DNA, 30 bp, Artificial Sequence
  Description of Artificial Sequence: Synthetic casein; inner sequence
cacgcatgtcgcatcgtccctaccgtcacg

SEQ ID NO: 48907 - DNA, 30 bp, Artificial Sequence
  Description of Artificial Sequence: Synthetic casein; inner sequence
gcgatgcggtacgtcacactgtccgccaca

SEQ ID NO: 48908 - DNA, 30 bp, Artificial Sequence; identical to SEQ ID NO: 28771
  Description of Artificial Sequence: Synthetic casein; inner sequence

SEQ ID NO: 48909 - DNA, 30 bp, Artificial Sequence
  Description of Artificial Sequence: Synthetic casein; inner sequence
ggacgcaacgtaccgtatcgtgaccatgta

SEQ ID NO: 48910 - DNA, 30 bp, Artificial Sequence
  Description of Artificial Sequence: Synthetic casein; inner sequence
ggcattcacgcacctacacgtgggcacgta

SEQ ID NO: 48911 - DNA, 28 bp, Artificial Sequence
  Description of Artificial Sequence: Synthetic casein; inner sequence
cgcaccgtcgatacgtcatgcacgcacc

SEQ ID NO: 48912 - DNA, 30 bp, Artificial Sequence; identical to SEQ ID NO: 437
  Description of Artificial Sequence: Synthetic casein; inner sequence

SEQ ID NO: 48913 - DNA, 30 bp, Artificial Sequence; identical to SEQ ID NO: 44825
  Description of Artificial Sequence: Synthetic casein; inner sequence

SEQ ID NO: 48914 - DNA, 30 bp, Artificial Sequence; identical to SEQ ID NO: 20269
  Description of Artificial Sequence: Synthetic casein; inner sequence

SEQ ID NO: 48915 - DNA, 30 bp, Artificial Sequence; identical to SEQ ID NO: 4898
  Description of Artificial Sequence: Synthetic casein; inner sequence

SEQ ID NO: 48916 - DNA, 30 bp, Artificial Sequence
  Description of Artificial Sequence: Synthetic casein; inner sequence
ggacgcaacgtaccgtatcgcggccatgtg

SEQ ID NO: 48917 - DNA, 30 bp, Artificial Sequence
  Description of Artificial Sequence: Synthetic casein; inner sequence
ggacgcaacgtaccgtatcgtgggcatgtg

SEQ ID NO: 48918 - DNA, 30 bp, Artificial Sequence; identical to SEQ ID NO: 44905
  Description of Artificial Sequence: Synthetic casein; inner sequence

SEQ ID NO: 48919 - DNA, 30 bp, Artificial Sequence
  Description of Artificial Sequence: Synthetic casein; inner sequence
ggatgcaacgtaccgtatcgtggccatgtg

SEQ ID NO: 48920 - DNA, 30 bp, Artificial Sequence; identical to SEQ ID NO: 80
  Description of Artificial Sequence: Synthetic casein; inner sequence

SEQ ID NO: 48921 - DNA, 30 bp, Artificial Sequence
  Description of Artificial Sequence: Synthetic casein; inner sequence
ggacacaacgtaccgtatcgtggccatgtg

SEQ ID NO: 48922 - DNA, 30 bp, Artificial Sequence; identical to SEQ ID NO: 44993
  Description of Artificial Sequence: Synthetic casein; inner sequence

SEQ ID NO: 48923 - DNA, 30 bp, Artificial Sequence
  Description of Artificial Sequence: Synthetic casein; inner sequence
cgtgacacggtacgcatcgtatgtgtgatg

SEQ ID NO: 48924 - DNA, 30 bp, Artificial Sequence
  Description of Artificial Sequence: Synthetic casein; inner sequence
gacgtaacgcgttacggtgtcgcatgcacg

SEQ ID NO: 48925 - DNA, 30 bp, Artificial Sequence; identical to SEQ ID NO: 44737
  Description of Artificial Sequence: Synthetic casein; inner sequence

SEQ ID NO: 48926 - DNA, 30 bp, Artificial Sequence; identical to SEQ ID NO: 311
  Description of Artificial Sequence: Synthetic casein; inner sequence

SEQ ID NO: 48927 - DNA, 30 bp, Artificial Sequence; identical to SEQ ID NO: 12996
  Description of Artificial Sequence: Synthetic casein; inner sequence

SEQ ID NO: 48928 - DNA, 30 bp, Artificial Sequence
  Description of Artificial Sequence: Synthetic casein; inner sequence
ggccacagcgtaacgttcgagtggtacgta

SEQ ID NO: 48929 - DNA, 30 bp, Artificial Sequence; identical to SEQ ID NO: 44650
  Description of Artificial Sequence: Synthetic casein; inner sequence

SEQ ID NO: 48930 - DNA, 30 bp, Artificial Sequence; identical to SEQ ID NO: 28830
  Description of Artificial Sequence: Synthetic casein; inner sequence

SEQ ID NO: 48931 - DNA, 30 bp, Artificial Sequence
  Description of Artificial Sequence: Synthetic casein; inner sequence
gcacacggtacgtacggcacgatatgcgcg

SEQ ID NO: 48932 - DNA, 30 bp, Artificial Sequence
  Description of Artificial Sequence: Synthetic casein; inner sequence
gcacgactcgcaccctatcatgaggccata

SEQ ID NO: 48933 - DNA, 30 bp, Artificial Sequence
  Description of Artificial Sequence: Synthetic casein; inner sequence
cacgcaatgacgtgtgagcatgacgtcgcg

SEQ ID NO: 48934 - DNA, 30 bp, Artificial Sequence; identical to SEQ ID NO: 28674
  Description of Artificial Sequence: Synthetic casein; inner sequence

SEQ ID NO: 48935 - DNA, 30 bp, Artificial Sequence; identical to SEQ ID NO: 16627
  Description of Artificial Sequence: Synthetic casein; inner sequence

SEQ ID NO: 48936 - DNA, 30 bp, Artificial Sequence; identical to SEQ ID NO: 365
  Description of Artificial Sequence: Synthetic casein; inner sequence

SEQ ID NO: 48937 - DNA, 30 bp, Artificial Sequence; identical to SEQ ID NO: 20787
  Description of Artificial Sequence: Synthetic casein; inner sequence

SEQ ID NO: 48938 - DNA, 30 bp, Artificial Sequence
  Description of Artificial Sequence: Synthetic casein; inner sequence
cgatacgcgtcacgatacgtagcatgcgca

SEQ ID NO: 48939 - DNA, 30 bp, Artificial Sequence
  Description of Artificial Sequence: Synthetic casein; inner sequence
cgacacgatgcatgcgtaccgtctgcacca

SEQ ID NO: 48940 - DNA, 30 bp, Artificial Sequence; identical to SEQ ID NO: 20964
  Description of Artificial Sequence: Synthetic casein; inner sequence

SEQ ID NO: 48941 - DNA, 30 bp, Artificial Sequence; identical to SEQ ID NO: 20708
  Description of Artificial Sequence: Synthetic casein; inner sequence

SEQ ID NO: 48942 - DNA, 29 bp, Artificial Sequence
  Description of Artificial Sequence: Synthetic casein; inner sequence
gcacgtcgaaacacgtagccatgcacggt

SEQ ID NO: 48943 - DNA, 30 bp, Artificial Sequence; identical to SEQ ID NO: 32379
  Description of Artificial Sequence: Synthetic casein; inner sequence

SEQ ID NO: 48944 - DNA, 30 bp, Artificial Sequence
  Description of Artificial Sequence: Synthetic casein; inner sequence
cgtcacgcaaggagggacatgtgcttcgcg

SEQ ID NO: 48945 - DNA, 28 bp, Artificial Sequence
  Description of Artificial Sequence: Synthetic casein; inner sequence
ggacgcaacgtaacgtatcgtggccatg

SEQ ID NO: 48946 - DNA, 30 bp, Artificial Sequence
  Description of Artificial Sequence: Synthetic casein; inner sequence
gcgatcgcaacgcaacgtgtgtacgtatcg

SEQ ID NO: 48947 - DNA, 30 bp, Artificial Sequence
  Description of Artificial Sequence: Synthetic casein; inner sequence
gcacgtcacgccctgatgtgtcacggcaca

SEQ ID NO: 48948 - DNA, 30 bp, Artificial Sequence; identical to SEQ ID NO: 44583
  Description of Artificial Sequence: Synthetic casein; inner sequence

SEQ ID NO: 48949 - DNA, 30 bp, Artificial Sequence; identical to SEQ ID NO: 44918
  Description of Artificial Sequence: Synthetic casein; inner sequence

SEQ ID NO: 48950 - DNA, 30 bp, Artificial Sequence
  Description of Artificial Sequence: Synthetic casein; inner sequence
tcacgactcgcaccctatcatgtaggcatg

SEQ ID NO: 48951 - DNA, 30 bp, Artificial Sequence; identical to SEQ ID NO: 20475
  Description of Artificial Sequence: Synthetic casein; inner sequence

SEQ ID NO: 48952 - DNA, 30 bp, Artificial Sequence; identical to SEQ ID NO: 44864
  Description of Artificial Sequence: Synthetic casein; inner sequence

SEQ ID NO: 48953 - DNA, 30 bp, Artificial Sequence
  Description of Artificial Sequence: Synthetic casein; inner sequence
catgcgcagtgacgtacgtgcatgttcatg

SEQ ID NO: 48954 - DNA, 30 bp, Artificial Sequence
  Description of Artificial Sequence: Synthetic casein; inner sequence
ggccacaacgtacctcaacgtggacgtgca

SEQ ID NO: 48955 - DNA, 30 bp, Artificial Sequence; identical to SEQ ID NO: 20691
  Description of Artificial Sequence: Synthetic casein; inner sequence

SEQ ID NO: 48956 - DNA, 28 bp, Artificial Sequence
  Description of Artificial Sequence: Synthetic casein; inner sequence
ggactcaacgtaccgtatcgtggccatg

SEQ ID NO: 48957 - DNA, 30 bp, Artificial Sequence; identical to SEQ ID NO: 32802
  Description of Artificial Sequence: Synthetic casein; inner sequence

SEQ ID NO: 48958 - DNA, 30 bp, Artificial Sequence; identical to SEQ ID NO: 203
  Description of Artificial Sequence: Synthetic casein; inner sequence

SEQ ID NO: 48959 - DNA, 30 bp, Artificial Sequence
  Description of Artificial Sequence: Synthetic casein; inner sequence
cgtgacgacgtagtgtcctgtcgcatcacg

SEQ ID NO: 48960 - DNA, 30 bp, Artificial Sequence
  Description of Artificial Sequence: Synthetic casein; inner sequence
cgacaccacgctacgtcacgttacggcaca

SEQ ID NO: 48961 - DNA, 30 bp, Artificial Sequence
  Description of Artificial Sequence: Synthetic casein; inner sequence
ccatgcatcgtaacgcatcgtaccggcacg

SEQ ID NO: 48962 - DNA, 30 bp, Artificial Sequence; identical to SEQ ID NO: 44975
  Description of Artificial Sequence: Synthetic casein; inner sequence

SEQ ID NO: 48963 - DNA, 30 bp, Artificial Sequence; identical to SEQ ID NO: 449
  Description of Artificial Sequence: Synthetic casein; inner sequence

SEQ ID NO: 48964 - DNA, 30 bp, Artificial Sequence
  Description of Artificial Sequence: Synthetic casein; inner sequence
ggacgcaacgtaccgcatcgtggccatgcg

SEQ ID NO: 48965 - DNA, 30 bp, Artificial Sequence; identical to SEQ ID NO: 44804
  Description of Artificial Sequence: Synthetic casein; inner sequence

SEQ ID NO: 48966 - DNA, 30 bp, Artificial Sequence
  Description of Artificial Sequence: Synthetic casein; inner sequence
cgatacgcgtaaggcaatgcgtactgcacg

SEQ ID NO: 48967 - DNA, 30 bp, Artificial Sequence; identical to SEQ ID NO: 178
  Description of Artificial Sequence: Synthetic casein; inner sequence

SEQ ID NO: 48968 - DNA, 30 bp, Artificial Sequence
  Description of Artificial Sequence: Synthetic casein; inner sequence
gcgtcacggaccgtacgttgtcactgcgta

SEQ ID NO: 48969 - DNA, 30 bp, Artificial Sequence; identical to SEQ ID NO: 28574
  Description of Artificial Sequence: Synthetic casein; inner sequence

SEQ ID NO: 48970 - DNA, 28 bp, Artificial Sequence
  Description of Artificial Sequence: Synthetic casein; inner sequence
ggacgcaccgtaccgtatcgtggccatg

SEQ ID NO: 48971 - DNA, 30 bp, Artificial Sequence; identical to SEQ ID NO: 24
  Description of Artificial Sequence: Synthetic casein; inner sequence

SEQ ID NO: 48972 - DNA, 30 bp, Artificial Sequence; identical to SEQ ID NO: 44883
  Description of Artificial Sequence: Synthetic casein; inner sequence

SEQ ID NO: 48973 - DNA, 30 bp, Artificial Sequence; identical to SEQ ID NO: 16555
  Description of Artificial Sequence: Synthetic casein; inner sequence

SEQ ID NO: 48974 - DNA, 30 bp, Artificial Sequence
  Description of Artificial Sequence: Synthetic casein; inner sequence
acgcatcacacgtgtcgtacgtacctcgcg

SEQ ID NO: 48975 - DNA, 30 bp, Artificial Sequence; identical to SEQ ID NO: 756
  Description of Artificial Sequence: Synthetic casein; inner sequence

SEQ ID NO: 48976 - DNA, 30 bp, Artificial Sequence
  Description of Artificial Sequence: Synthetic casein; inner sequence
gcgtcacgatgatgcgacacggcatgcaca

SEQ ID NO: 48977 - DNA, 30 bp, Artificial Sequence; identical to SEQ ID NO: 20662
  Description of Artificial Sequence: Synthetic casein; inner sequence

SEQ ID NO: 48978 - DNA, 30 bp, Artificial Sequence
  Description of Artificial Sequence: Synthetic casein; inner sequence
gcatcgcagcgttacgcactcgacgtgaca

SEQ ID NO: 48979 - DNA, 30 bp, Artificial Sequence
  Description of Artificial Sequence: Synthetic casein; inner sequence
gcgtgtagcgtcagtgcatgcgatgacacg

SEQ ID NO: 48980 - DNA, 30 bp, Artificial Sequence; identical to SEQ ID NO: 20801
  Description of Artificial Sequence: Synthetic casein; inner sequence

SEQ ID NO: 48981 - DNA, 30 bp, Artificial Sequence
  Description of Artificial Sequence: Synthetic casein; inner sequence
ggacgcagcgtaacgttcgaggggtacgta

SEQ ID NO: 48982 - DNA, 30 bp, Artificial Sequence
  Description of Artificial Sequence: Synthetic casein; inner sequence
gcggcacgacgtaacggacacgacgtcacg

SEQ ID NO: 48983 - DNA, 30 bp, Artificial Sequence
  Description of Artificial Sequence: Synthetic casein; inner sequence
ggcatgcgaggaacgaggcatgatgcgtca

SEQ ID NO: 48984 - DNA, 30 bp, Artificial Sequence; identical to SEQ ID NO: 44994
  Description of Artificial Sequence: Synthetic casein; inner sequence

SEQ ID NO: 48985 - DNA, 30 bp, Artificial Sequence
  Description of Artificial Sequence: Synthetic casein; inner sequence
gcgatgcacgtaggtggccttgtcgtcacg

SEQ ID NO: 48986 - DNA, 30 bp, Artificial Sequence; identical to SEQ ID NO: 44971
  Description of Artificial Sequence: Synthetic casein; inner sequence

SEQ ID NO: 48987 - DNA, 30 bp, Artificial Sequence; identical to SEQ ID NO: 821
  Description of Artificial Sequence: Synthetic casein; inner sequence

SEQ ID NO: 48988 - DNA, 30 bp, Artificial Sequence; identical to SEQ ID NO: 44923
  Description of Artificial Sequence: Synthetic casein; inner sequence

SEQ ID NO: 48989 - DNA, 30 bp, Artificial Sequence; identical to SEQ ID NO: 154
  Description of Artificial Sequence: Synthetic casein; inner sequence

SEQ ID NO: 48990 - DNA, 30 bp, Artificial Sequence; identical to SEQ ID NO: 44837
  Description of Artificial Sequence: Synthetic casein; inner sequence

SEQ ID NO: 48991 - DNA, 31 bp, Artificial Sequence
  Description of Artificial Sequence: Synthetic casein; inner sequence
cacgtgtcaacgtgcattacgtcgtgacgcg

SEQ ID NO: 48992 - DNA, 30 bp, Artificial Sequence
  Description of Artificial Sequence: Synthetic casein; inner sequence
gcacgatgcaacgcgtgtcctcgcgtcacg

SEQ ID NO: 48993 - DNA, 30 bp, Artificial Sequence
  Description of Artificial Sequence: Synthetic casein; inner sequence
ggacgcaacgtaccgtatcgtggccacgta

SEQ ID NO: 48994 - DNA, 30 bp, Artificial Sequence
  Description of Artificial Sequence: Synthetic casein; inner sequence
gcacatgcgacagtacgtacgtatcgcacc

SEQ ID NO: 48995 - DNA, 30 bp, Artificial Sequence
  Description of Artificial Sequence: Synthetic casein; inner sequence
acgtacacgtaaggcatcacgtacttcgca

SEQ ID NO: 48996 - DNA, 30 bp, Artificial Sequence
  Description of Artificial Sequence: Synthetic casein; inner sequence
gtcacgcacgaacactatcatggcggcatg

SEQ ID NO: 48997 - DNA, 30 bp, Artificial Sequence
  Description of Artificial Sequence: Synthetic casein; inner sequence
cacgtcacatgcacgacgattcgcgtggtg

SEQ ID NO: 48998 - DNA, 30 bp, Artificial Sequence; identical to SEQ ID NO: 531
  Description of Artificial Sequence: Synthetic casein; inner sequence

SEQ ID NO: 48999 - DNA, 30 bp, Artificial Sequence; identical to SEQ ID NO: 903
  Description of Artificial Sequence: Synthetic casein; inner sequence

SEQ ID NO: 49000 - DNA, 30 bp, Artificial Sequence
  Description of Artificial Sequence: Synthetic casein; inner sequence
cgtgacgcgacgtgacgacatagctgcgtg

SEQ ID NO: 49001 - DNA, 30 bp, Artificial Sequence
  Description of Artificial Sequence: Synthetic casein; inner sequence
gcgttacgtgcatcaggccatcacgttgcc

SEQ ID NO: 49002 - DNA, 28 bp, Artificial Sequence
  Description of Artificial Sequence: Synthetic casein; inner sequence
gcaacgcacgacacgatgtcacgtcgcg

SEQ ID NO: 49003 - DNA, 53 bp, Artificial Sequence; identical to SEQ ID NO: 1004
  Description of Artificial Sequence: Synthetic casein;  5' sequence and inner sequence

SEQ ID NO: 49004 - DNA, 53 bp, Artificial Sequence; identical to SEQ ID NO: 1003
  Description of Artificial Sequence: Synthetic casein;  5' sequence and inner sequence

SEQ ID NO: 49005 - DNA, 53 bp, Artificial Sequence; identical to SEQ ID NO: 1021
  Description of Artificial Sequence: Synthetic casein;  5' sequence and inner sequence

SEQ ID NO: 49006 - DNA, 53 bp, Artificial Sequence; identical to SEQ ID NO: 1006
  Description of Artificial Sequence: Synthetic casein;  5' sequence and inner sequence

SEQ ID NO: 49007 - DNA, 53 bp, Artificial Sequence; identical to SEQ ID NO: 1052
  Description of Artificial Sequence: Synthetic casein;  5' sequence and inner sequence

SEQ ID NO: 49008 - DNA, 53 bp, Artificial Sequence; identical to SEQ ID NO: 1010
  Description of Artificial Sequence: Synthetic casein;  5' sequence and inner sequence

SEQ ID NO: 49009 - DNA, 53 bp, Artificial Sequence; identical to SEQ ID NO: 1020
  Description of Artificial Sequence: Synthetic casein;  5' sequence and inner sequence

SEQ ID NO: 49010 - DNA, 53 bp, Artificial Sequence; identical to SEQ ID NO: 1005
  Description of Artificial Sequence: Synthetic casein;  5' sequence and inner sequence

SEQ ID NO: 49011 - DNA, 53 bp, Artificial Sequence; identical to SEQ ID NO: 1008
  Description of Artificial Sequence: Synthetic casein;  5' sequence and inner sequence

SEQ ID NO: 49012 - DNA, 53 bp, Artificial Sequence; identical to SEQ ID NO: 1007
  Description of Artificial Sequence: Synthetic casein;  5' sequence and inner sequence

SEQ ID NO: 49013 - DNA, 53 bp, Artificial Sequence; identical to SEQ ID NO: 1081
  Description of Artificial Sequence: Synthetic casein;  5' sequence and inner sequence

SEQ ID NO: 49014 - DNA, 53 bp, Artificial Sequence; identical to SEQ ID NO: 1011
  Description of Artificial Sequence: Synthetic casein;  5' sequence and inner sequence

SEQ ID NO: 49015 - DNA, 51 bp, Artificial Sequence; identical to SEQ ID NO: 1241
  Description of Artificial Sequence: Synthetic casein;  5' sequence and inner sequence

SEQ ID NO: 49016 - DNA, 53 bp, Artificial Sequence; identical to SEQ ID NO: 1201
  Description of Artificial Sequence: Synthetic casein;  5' sequence and inner sequence

SEQ ID NO: 49017 - DNA, 53 bp, Artificial Sequence; identical to SEQ ID NO: 1033
  Description of Artificial Sequence: Synthetic casein;  5' sequence and inner sequence

SEQ ID NO: 49018 - DNA, 53 bp, Artificial Sequence; identical to SEQ ID NO: 1030
  Description of Artificial Sequence: Synthetic casein;  5' sequence and inner sequence

SEQ ID NO: 49019 - DNA, 53 bp, Artificial Sequence; identical to SEQ ID NO: 1220
  Description of Artificial Sequence: Synthetic casein;  5' sequence and inner sequence

SEQ ID NO: 49020 - DNA, 53 bp, Artificial Sequence; identical to SEQ ID NO: 1040
  Description of Artificial Sequence: Synthetic casein;  5' sequence and inner sequence

SEQ ID NO: 49021 - DNA, 53 bp, Artificial Sequence; identical to SEQ ID NO: 1009
  Description of Artificial Sequence: Synthetic casein;  5' sequence and inner sequence

SEQ ID NO: 49022 - DNA, 53 bp, Artificial Sequence; identical to SEQ ID NO: 1023
  Description of Artificial Sequence: Synthetic casein;  5' sequence and inner sequence

SEQ ID NO: 49023 - DNA, 53 bp, Artificial Sequence; identical to SEQ ID NO: 1046
  Description of Artificial Sequence: Synthetic casein;  5' sequence and inner sequence

SEQ ID NO: 49024 - DNA, 53 bp, Artificial Sequence; identical to SEQ ID NO: 1279
  Description of Artificial Sequence: Synthetic casein;  5' sequence and inner sequence

SEQ ID NO: 49025 - DNA, 53 bp, Artificial Sequence; identical to SEQ ID NO: 17640
  Description of Artificial Sequence: Synthetic casein;  5' sequence and inner sequence

SEQ ID NO: 49026 - DNA, 53 bp, Artificial Sequence; identical to SEQ ID NO: 1028
  Description of Artificial Sequence: Synthetic casein;  5' sequence and inner sequence

SEQ ID NO: 49027 - DNA, 53 bp, Artificial Sequence; identical to SEQ ID NO: 1078
  Description of Artificial Sequence: Synthetic casein;  5' sequence and inner sequence

SEQ ID NO: 49028 - DNA, 53 bp, Artificial Sequence; identical to SEQ ID NO: 1012
  Description of Artificial Sequence: Synthetic casein;  5' sequence and inner sequence

SEQ ID NO: 49029 - DNA, 53 bp, Artificial Sequence; identical to SEQ ID NO: 1014
  Description of Artificial Sequence: Synthetic casein;  5' sequence and inner sequence

SEQ ID NO: 49030 - DNA, 53 bp, Artificial Sequence; identical to SEQ ID NO: 1036
  Description of Artificial Sequence: Synthetic casein;  5' sequence and inner sequence

SEQ ID NO: 49031 - DNA, 53 bp, Artificial Sequence; identical to SEQ ID NO: 1079
  Description of Artificial Sequence: Synthetic casein;  5' sequence and inner sequence

SEQ ID NO: 49032 - DNA, 53 bp, Artificial Sequence; identical to SEQ ID NO: 29278
  Description of Artificial Sequence: Synthetic casein;  5' sequence and inner sequence

SEQ ID NO: 49033 - DNA, 53 bp, Artificial Sequence; identical to SEQ ID NO: 1041
  Description of Artificial Sequence: Synthetic casein;  5' sequence and inner sequence

SEQ ID NO: 49034 - DNA, 53 bp, Artificial Sequence; identical to SEQ ID NO: 1526
  Description of Artificial Sequence: Synthetic casein;  5' sequence and inner sequence

SEQ ID NO: 49035 - DNA, 53 bp, Artificial Sequence; identical to SEQ ID NO: 1506
  Description of Artificial Sequence: Synthetic casein;  5' sequence and inner sequence

SEQ ID NO: 49036 - DNA, 53 bp, Artificial Sequence; identical to SEQ ID NO: 29199
  Description of Artificial Sequence: Synthetic casein;  5' sequence and inner sequence

SEQ ID NO: 49037 - DNA, 53 bp, Artificial Sequence; identical to SEQ ID NO: 1458
  Description of Artificial Sequence: Synthetic casein;  5' sequence and inner sequence

SEQ ID NO: 49038 - DNA, 53 bp, Artificial Sequence; identical to SEQ ID NO: 5659
  Description of Artificial Sequence: Synthetic casein;  5' sequence and inner sequence

SEQ ID NO: 49039 - DNA, 53 bp, Artificial Sequence; identical to SEQ ID NO: 29208
  Description of Artificial Sequence: Synthetic casein;  5' sequence and inner sequence

SEQ ID NO: 49040 - DNA, 53 bp, Artificial Sequence; identical to SEQ ID NO: 1108
  Description of Artificial Sequence: Synthetic casein;  5' sequence and inner sequence

SEQ ID NO: 49041 - DNA, 53 bp, Artificial Sequence; identical to SEQ ID NO: 1015
  Description of Artificial Sequence: Synthetic casein;  5' sequence and inner sequence

SEQ ID NO: 49042 - DNA, 53 bp, Artificial Sequence; identical to SEQ ID NO: 29252
  Description of Artificial Sequence: Synthetic casein;  5' sequence and inner sequence

SEQ ID NO: 49043 - DNA, 53 bp, Artificial Sequence; identical to SEQ ID NO: 21495
  Description of Artificial Sequence: Synthetic casein;  5' sequence and inner sequence

SEQ ID NO: 49044 - DNA, 53 bp, Artificial Sequence; identical to SEQ ID NO: 1381
  Description of Artificial Sequence: Synthetic casein;  5' sequence and inner sequence

SEQ ID NO: 49045 - DNA, 53 bp, Artificial Sequence; identical to SEQ ID NO: 1323
  Description of Artificial Sequence: Synthetic casein;  5' sequence and inner sequence

SEQ ID NO: 49046 - DNA, 53 bp, Artificial Sequence; identical to SEQ ID NO: 21468
  Description of Artificial Sequence: Synthetic casein;  5' sequence and inner sequence

SEQ ID NO: 49047 - DNA, 53 bp, Artificial Sequence; identical to SEQ ID NO: 1281
  Description of Artificial Sequence: Synthetic casein;  5' sequence and inner sequence

SEQ ID NO: 49048 - DNA, 52 bp, Artificial Sequence; identical to SEQ ID NO: 1070
  Description of Artificial Sequence: Synthetic casein;  5' sequence and inner sequence

SEQ ID NO: 49049 - DNA, 53 bp, Artificial Sequence; identical to SEQ ID NO: 1071
  Description of Artificial Sequence: Synthetic casein;  5' sequence and inner sequence

SEQ ID NO: 49050 - DNA, 53 bp, Artificial Sequence; identical to SEQ ID NO: 1013
  Description of Artificial Sequence: Synthetic casein;  5' sequence and inner sequence

SEQ ID NO: 49051 - DNA, 53 bp, Artificial Sequence; identical to SEQ ID NO: 17818
  Description of Artificial Sequence: Synthetic casein;  5' sequence and inner sequence

SEQ ID NO: 49052 - DNA, 54 bp, Artificial Sequence; identical to SEQ ID NO: 17373
  Description of Artificial Sequence: Synthetic casein;  5' sequence and inner sequence

SEQ ID NO: 49053 - DNA, 53 bp, Artificial Sequence; identical to SEQ ID NO: 1045
  Description of Artificial Sequence: Synthetic casein;  5' sequence and inner sequence

SEQ ID NO: 49054 - DNA, 53 bp, Artificial Sequence; identical to SEQ ID NO: 1121
  Description of Artificial Sequence: Synthetic casein;  5' sequence and inner sequence

SEQ ID NO: 49055 - DNA, 53 bp, Artificial Sequence; identical to SEQ ID NO: 29108
  Description of Artificial Sequence: Synthetic casein;  5' sequence and inner sequence

SEQ ID NO: 49056 - DNA, 53 bp, Artificial Sequence; identical to SEQ ID NO: 1359
  Description of Artificial Sequence: Synthetic casein;  5' sequence and inner sequence

SEQ ID NO: 49057 - DNA, 53 bp, Artificial Sequence; identical to SEQ ID NO: 21540
  Description of Artificial Sequence: Synthetic casein;  5' sequence and inner sequence

SEQ ID NO: 49058 - DNA, 53 bp, Artificial Sequence; identical to SEQ ID NO: 29436
  Description of Artificial Sequence: Synthetic casein;  5' sequence and inner sequence

SEQ ID NO: 49059 - DNA, 53 bp, Artificial Sequence; identical to SEQ ID NO: 21917
  Description of Artificial Sequence: Synthetic casein;  5' sequence and inner sequence

SEQ ID NO: 49060 - DNA, 53 bp, Artificial Sequence; identical to SEQ ID NO: 1491
  Description of Artificial Sequence: Synthetic casein;  5' sequence and inner sequence

SEQ ID NO: 49061 - DNA, 53 bp, Artificial Sequence; identical to SEQ ID NO: 45212
  Description of Artificial Sequence: Synthetic casein;  5' sequence and inner sequence

SEQ ID NO: 49062 - DNA, 52 bp, Artificial Sequence; identical to SEQ ID NO: 45164
  Description of Artificial Sequence: Synthetic casein;  5' sequence and inner sequence

SEQ ID NO: 49063 - DNA, 53 bp, Artificial Sequence; identical to SEQ ID NO: 1035
  Description of Artificial Sequence: Synthetic casein;  5' sequence and inner sequence

SEQ ID NO: 49064 - DNA, 53 bp, Artificial Sequence; identical to SEQ ID NO: 17266
  Description of Artificial Sequence: Synthetic casein;  5' sequence and inner sequence

SEQ ID NO: 49065 - DNA, 53 bp, Artificial Sequence; identical to SEQ ID NO: 1025
  Description of Artificial Sequence: Synthetic casein;  5' sequence and inner sequence

SEQ ID NO: 49066 - DNA, 53 bp, Artificial Sequence; identical to SEQ ID NO: 29526
  Description of Artificial Sequence: Synthetic casein;  5' sequence and inner sequence

SEQ ID NO: 49067 - DNA, 53 bp, Artificial Sequence; identical to SEQ ID NO: 1018
  Description of Artificial Sequence: Synthetic casein;  5' sequence and inner sequence

SEQ ID NO: 49068 - DNA, 53 bp, Artificial Sequence; identical to SEQ ID NO: 17837
  Description of Artificial Sequence: Synthetic casein;  5' sequence and inner sequence

SEQ ID NO: 49069 - DNA, 53 bp, Artificial Sequence; identical to SEQ ID NO: 1340
  Description of Artificial Sequence: Synthetic casein;  5' sequence and inner sequence

SEQ ID NO: 49070 - DNA, 53 bp, Artificial Sequence; identical to SEQ ID NO: 29477
  Description of Artificial Sequence: Synthetic casein;  5' sequence and inner sequence

SEQ ID NO: 49071 - DNA, 53 bp, Artificial Sequence; identical to SEQ ID NO: 1017
  Description of Artificial Sequence: Synthetic casein;  5' sequence and inner sequence

SEQ ID NO: 49072 - DNA, 53 bp, Artificial Sequence; identical to SEQ ID NO: 29699
  Description of Artificial Sequence: Synthetic casein;  5' sequence and inner sequence

SEQ ID NO: 49073 - DNA, 53 bp, Artificial Sequence; identical to SEQ ID NO: 21105
  Description of Artificial Sequence: Synthetic casein;  5' sequence and inner sequence

SEQ ID NO: 49074 - DNA, 53 bp, Artificial Sequence; identical to SEQ ID NO: 1746
  Description of Artificial Sequence: Synthetic casein;  5' sequence and inner sequence

SEQ ID NO: 49075 - DNA, 53 bp, Artificial Sequence; identical to SEQ ID NO: 45219
  Description of Artificial Sequence: Synthetic casein;  5' sequence and inner sequence

SEQ ID NO: 49076 - DNA, 53 bp, Artificial Sequence; identical to SEQ ID NO: 1039
  Description of Artificial Sequence: Synthetic casein;  5' sequence and inner sequence

SEQ ID NO: 49077 - DNA, 53 bp, Artificial Sequence; identical to SEQ ID NO: 29147
  Description of Artificial Sequence: Synthetic casein;  5' sequence and inner sequence

SEQ ID NO: 49078 - DNA, 53 bp, Artificial Sequence; identical to SEQ ID NO: 1053
  Description of Artificial Sequence: Synthetic casein;  5' sequence and inner sequence

SEQ ID NO: 49079 - DNA, 53 bp, Artificial Sequence; identical to SEQ ID NO: 29382
  Description of Artificial Sequence: Synthetic casein;  5' sequence and inner sequence

SEQ ID NO: 49080 - DNA, 53 bp, Artificial Sequence; identical to SEQ ID NO: 29320
  Description of Artificial Sequence: Synthetic casein;  5' sequence and inner sequence

SEQ ID NO: 49081 - DNA, 53 bp, Artificial Sequence; identical to SEQ ID NO: 1066
  Description of Artificial Sequence: Synthetic casein;  5' sequence and inner sequence

SEQ ID NO: 49082 - DNA, 53 bp, Artificial Sequence; identical to SEQ ID NO: 29381
  Description of Artificial Sequence: Synthetic casein;  5' sequence and inner sequence

SEQ ID NO: 49083 - DNA, 53 bp, Artificial Sequence; identical to SEQ ID NO: 29541
  Description of Artificial Sequence: Synthetic casein;  5' sequence and inner sequence

SEQ ID NO: 49084 - DNA, 53 bp, Artificial Sequence; identical to SEQ ID NO: 29751
  Description of Artificial Sequence: Synthetic casein;  5' sequence and inner sequence

SEQ ID NO: 49085 - DNA, 53 bp, Artificial Sequence; identical to SEQ ID NO: 29425
  Description of Artificial Sequence: Synthetic casein;  5' sequence and inner sequence

SEQ ID NO: 49086 - DNA, 54 bp, Artificial Sequence; identical to SEQ ID NO: 1971
  Description of Artificial Sequence: Synthetic casein;  5' sequence and inner sequence

SEQ ID NO: 49087 - DNA, 53 bp, Artificial Sequence; identical to SEQ ID NO: 1067
  Description of Artificial Sequence: Synthetic casein;  5' sequence and inner sequence

SEQ ID NO: 49088 - DNA, 53 bp, Artificial Sequence; identical to SEQ ID NO: 1174
  Description of Artificial Sequence: Synthetic casein;  5' sequence and inner sequence

SEQ ID NO: 49089 - DNA, 53 bp, Artificial Sequence; identical to SEQ ID NO: 17211
  Description of Artificial Sequence: Synthetic casein;  5' sequence and inner sequence

SEQ ID NO: 49090 - DNA, 53 bp, Artificial Sequence; identical to SEQ ID NO: 1517
  Description of Artificial Sequence: Synthetic casein;  5' sequence and inner sequence

SEQ ID NO: 49091 - DNA, 53 bp, Artificial Sequence; identical to SEQ ID NO: 1231
  Description of Artificial Sequence: Synthetic casein;  5' sequence and inner sequence

SEQ ID NO: 49092 - DNA, 53 bp, Artificial Sequence; identical to SEQ ID NO: 1063
  Description of Artificial Sequence: Synthetic casein;  5' sequence and inner sequence

SEQ ID NO: 49093 - DNA, 53 bp, Artificial Sequence; identical to SEQ ID NO: 5627
  Description of Artificial Sequence: Synthetic casein;  5' sequence and inner sequence

SEQ ID NO: 49094 - DNA, 53 bp, Artificial Sequence; identical to SEQ ID NO: 1054
  Description of Artificial Sequence: Synthetic casein;  5' sequence and inner sequence

SEQ ID NO: 49095 - DNA, 53 bp, Artificial Sequence; identical to SEQ ID NO: 29379
  Description of Artificial Sequence: Synthetic casein;  5' sequence and inner sequence

SEQ ID NO: 49096 - DNA, 53 bp, Artificial Sequence; identical to SEQ ID NO: 1442
  Description of Artificial Sequence: Synthetic casein;  5' sequence and inner sequence

SEQ ID NO: 49097 - DNA, 53 bp, Artificial Sequence; identical to SEQ ID NO: 1049
  Description of Artificial Sequence: Synthetic casein;  5' sequence and inner sequence

SEQ ID NO: 49098 - DNA, 53 bp, Artificial Sequence; identical to SEQ ID NO: 1145
  Description of Artificial Sequence: Synthetic casein;  5' sequence and inner sequence

SEQ ID NO: 49099 - DNA, 53 bp, Artificial Sequence; identical to SEQ ID NO: 1283
  Description of Artificial Sequence: Synthetic casein;  5' sequence and inner sequence

SEQ ID NO: 49100 - DNA, 47 bp, Artificial Sequence
  Description of Artificial Sequence: Synthetic casein;  5' sequence and inner sequence
tagggaagagaaggacatatgatgcgtcacggcatacgtactgcgca

SEQ ID NO: 49101 - DNA, 53 bp, Artificial Sequence; identical to SEQ ID NO: 1184
  Description of Artificial Sequence: Synthetic casein;  5' sequence and inner sequence

SEQ ID NO: 49102 - DNA, 53 bp, Artificial Sequence; identical to SEQ ID NO: 29310
  Description of Artificial Sequence: Synthetic casein;  5' sequence and inner sequence

SEQ ID NO: 49103 - DNA, 53 bp, Artificial Sequence; identical to SEQ ID NO: 21524
  Description of Artificial Sequence: Synthetic casein;  5' sequence and inner sequence

SEQ ID NO: 49104 - DNA, 53 bp, Artificial Sequence; identical to SEQ ID NO: 1419
  Description of Artificial Sequence: Synthetic casein;  5' sequence and inner sequence

SEQ ID NO: 49105 - DNA, 53 bp, Artificial Sequence; identical to SEQ ID NO: 1059
  Description of Artificial Sequence: Synthetic casein;  5' sequence and inner sequence

SEQ ID NO: 49106 - DNA, 52 bp, Artificial Sequence; identical to SEQ ID NO: 29237
  Description of Artificial Sequence: Synthetic casein;  5' sequence and inner sequence

SEQ ID NO: 49107 - DNA, 53 bp, Artificial Sequence; identical to SEQ ID NO: 17634
  Description of Artificial Sequence: Synthetic casein;  5' sequence and inner sequence

SEQ ID NO: 49108 - DNA, 53 bp, Artificial Sequence; identical to SEQ ID NO: 1613
  Description of Artificial Sequence: Synthetic casein;  5' sequence and inner sequence

SEQ ID NO: 49109 - DNA, 53 bp, Artificial Sequence; identical to SEQ ID NO: 29985
  Description of Artificial Sequence: Synthetic casein;  5' sequence and inner sequence

SEQ ID NO: 49110 - DNA, 53 bp, Artificial Sequence; identical to SEQ ID NO: 1111
  Description of Artificial Sequence: Synthetic casein;  5' sequence and inner sequence

SEQ ID NO: 49111 - DNA, 53 bp, Artificial Sequence; identical to SEQ ID NO: 21486
  Description of Artificial Sequence: Synthetic casein;  5' sequence and inner sequence

SEQ ID NO: 49112 - DNA, 53 bp, Artificial Sequence; identical to SEQ ID NO: 13997
  Description of Artificial Sequence: Synthetic casein;  5' sequence and inner sequence

SEQ ID NO: 49113 - DNA, 53 bp, Artificial Sequence; identical to SEQ ID NO: 17603
  Description of Artificial Sequence: Synthetic casein;  5' sequence and inner sequence

SEQ ID NO: 49114 - DNA, 53 bp, Artificial Sequence; identical to SEQ ID NO: 1037
  Description of Artificial Sequence: Synthetic casein;  5' sequence and inner sequence

SEQ ID NO: 49115 - DNA, 53 bp, Artificial Sequence; identical to SEQ ID NO: 45321
  Description of Artificial Sequence: Synthetic casein;  5' sequence and inner sequence

SEQ ID NO: 49116 - DNA, 53 bp, Artificial Sequence; identical to SEQ ID NO: 29939
  Description of Artificial Sequence: Synthetic casein;  5' sequence and inner sequence

SEQ ID NO: 49117 - DNA, 53 bp, Artificial Sequence; identical to SEQ ID NO: 29243
  Description of Artificial Sequence: Synthetic casein;  5' sequence and inner sequence

SEQ ID NO: 49118 - DNA, 53 bp, Artificial Sequence; identical to SEQ ID NO: 5429
  Description of Artificial Sequence: Synthetic casein;  5' sequence and inner sequence

SEQ ID NO: 49119 - DNA, 53 bp, Artificial Sequence; identical to SEQ ID NO: 1212
  Description of Artificial Sequence: Synthetic casein;  5' sequence and inner sequence

SEQ ID NO: 49120 - DNA, 53 bp, Artificial Sequence; identical to SEQ ID NO: 1886
  Description of Artificial Sequence: Synthetic casein;  5' sequence and inner sequence

SEQ ID NO: 49121 - DNA, 53 bp, Artificial Sequence; identical to SEQ ID NO: 1687
  Description of Artificial Sequence: Synthetic casein;  5' sequence and inner sequence

SEQ ID NO: 49122 - DNA, 53 bp, Artificial Sequence; identical to SEQ ID NO: 45111
  Description of Artificial Sequence: Synthetic casein;  5' sequence and inner sequence

SEQ ID NO: 49123 - DNA, 53 bp, Artificial Sequence; identical to SEQ ID NO: 45742
  Description of Artificial Sequence: Synthetic casein;  5' sequence and inner sequence

SEQ ID NO: 49124 - DNA, 53 bp, Artificial Sequence; identical to SEQ ID NO: 45753
  Description of Artificial Sequence: Synthetic casein;  5' sequence and inner sequence

SEQ ID NO: 49125 - DNA, 53 bp, Artificial Sequence; identical to SEQ ID NO: 1123
  Description of Artificial Sequence: Synthetic casein;  5' sequence and inner sequence

SEQ ID NO: 49126 - DNA, 53 bp, Artificial Sequence; identical to SEQ ID NO: 29221
  Description of Artificial Sequence: Synthetic casein;  5' sequence and inner sequence

SEQ ID NO: 49127 - DNA, 53 bp, Artificial Sequence; identical to SEQ ID NO: 1243
  Description of Artificial Sequence: Synthetic casein;  5' sequence and inner sequence

SEQ ID NO: 49128 - DNA, 53 bp, Artificial Sequence; identical to SEQ ID NO: 29743
  Description of Artificial Sequence: Synthetic casein;  5' sequence and inner sequence

SEQ ID NO: 49129 - DNA, 53 bp, Artificial Sequence; identical to SEQ ID NO: 1172
  Description of Artificial Sequence: Synthetic casein;  5' sequence and inner sequence

SEQ ID NO: 49130 - DNA, 53 bp, Artificial Sequence; identical to SEQ ID NO: 45446
  Description of Artificial Sequence: Synthetic casein;  5' sequence and inner sequence

SEQ ID NO: 49131 - DNA, 53 bp, Artificial Sequence; identical to SEQ ID NO: 21473
  Description of Artificial Sequence: Synthetic casein;  5' sequence and inner sequence

SEQ ID NO: 49132 - DNA, 53 bp, Artificial Sequence; identical to SEQ ID NO: 45216
  Description of Artificial Sequence: Synthetic casein;  5' sequence and inner sequence

SEQ ID NO: 49133 - DNA, 53 bp, Artificial Sequence; identical to SEQ ID NO: 1414
  Description of Artificial Sequence: Synthetic casein;  5' sequence and inner sequence

SEQ ID NO: 49134 - DNA, 53 bp, Artificial Sequence; identical to SEQ ID NO: 1622
  Description of Artificial Sequence: Synthetic casein;  5' sequence and inner sequence

SEQ ID NO: 49135 - DNA, 53 bp, Artificial Sequence; identical to SEQ ID NO: 45623
  Description of Artificial Sequence: Synthetic casein;  5' sequence and inner sequence

SEQ ID NO: 49136 - DNA, 53 bp, Artificial Sequence; identical to SEQ ID NO: 17859
  Description of Artificial Sequence: Synthetic casein;  5' sequence and inner sequence

SEQ ID NO: 49137 - DNA, 53 bp, Artificial Sequence; identical to SEQ ID NO: 5289
  Description of Artificial Sequence: Synthetic casein;  5' sequence and inner sequence

SEQ ID NO: 49138 - DNA, 53 bp, Artificial Sequence
  Description of Artificial Sequence: Synthetic casein;  5' sequence and inner sequence
tagggaagagaaggacatatgatgcgacgtggcgcaacggatggacgtacgca

SEQ ID NO: 49139 - DNA, 53 bp, Artificial Sequence; identical to SEQ ID NO: 1684
  Description of Artificial Sequence: Synthetic casein;  5' sequence and inner sequence

SEQ ID NO: 49140 - DNA, 53 bp, Artificial Sequence; identical to SEQ ID NO: 45245
  Description of Artificial Sequence: Synthetic casein;  5' sequence and inner sequence

SEQ ID NO: 49141 - DNA, 53 bp, Artificial Sequence; identical to SEQ ID NO: 1379
  Description of Artificial Sequence: Synthetic casein;  5' sequence and inner sequence

SEQ ID NO: 49142 - DNA, 53 bp, Artificial Sequence; identical to SEQ ID NO: 1138
  Description of Artificial Sequence: Synthetic casein;  5' sequence and inner sequence

SEQ ID NO: 49143 - DNA, 53 bp, Artificial Sequence; identical to SEQ ID NO: 1611
  Description of Artificial Sequence: Synthetic casein;  5' sequence and inner sequence

SEQ ID NO: 49144 - DNA, 53 bp, Artificial Sequence; identical to SEQ ID NO: 29782
  Description of Artificial Sequence: Synthetic casein;  5' sequence and inner sequence

SEQ ID NO: 49145 - DNA, 53 bp, Artificial Sequence; identical to SEQ ID NO: 29195
  Description of Artificial Sequence: Synthetic casein;  5' sequence and inner sequence

SEQ ID NO: 49146 - DNA, 53 bp, Artificial Sequence; identical to SEQ ID NO: 1467
  Description of Artificial Sequence: Synthetic casein;  5' sequence and inner sequence

SEQ ID NO: 49147 - DNA, 53 bp, Artificial Sequence; identical to SEQ ID NO: 45900
  Description of Artificial Sequence: Synthetic casein;  5' sequence and inner sequence

SEQ ID NO: 49148 - DNA, 53 bp, Artificial Sequence; identical to SEQ ID NO: 29907
  Description of Artificial Sequence: Synthetic casein;  5' sequence and inner sequence

SEQ ID NO: 49149 - DNA, 53 bp, Artificial Sequence; identical to SEQ ID NO: 1343
  Description of Artificial Sequence: Synthetic casein;  5' sequence and inner sequence

SEQ ID NO: 49150 - DNA, 53 bp, Artificial Sequence; identical to SEQ ID NO: 45951
  Description of Artificial Sequence: Synthetic casein;  5' sequence and inner sequence

SEQ ID NO: 49151 - DNA, 53 bp, Artificial Sequence; identical to SEQ ID NO: 21151
  Description of Artificial Sequence: Synthetic casein;  5' sequence and inner sequence

SEQ ID NO: 49152 - DNA, 53 bp, Artificial Sequence; identical to SEQ ID NO: 29497
  Description of Artificial Sequence: Synthetic casein;  5' sequence and inner sequence

SEQ ID NO: 49153 - DNA, 53 bp, Artificial Sequence; identical to SEQ ID NO: 29233
  Description of Artificial Sequence: Synthetic casein;  5' sequence and inner sequence

SEQ ID NO: 49154 - DNA, 53 bp, Artificial Sequence; identical to SEQ ID NO: 1194
  Description of Artificial Sequence: Synthetic casein;  5' sequence and inner sequence

SEQ ID NO: 49155 - DNA, 53 bp, Artificial Sequence
  Description of Artificial Sequence: Synthetic casein;  5' sequence and inner sequence
tagggaagagaaggacatatgatgacgtgacgtgacggatggtgacgtacgca

SEQ ID NO: 49156 - DNA, 53 bp, Artificial Sequence; identical to SEQ ID NO: 29400
  Description of Artificial Sequence: Synthetic casein;  5' sequence and inner sequence

SEQ ID NO: 49157 - DNA, 53 bp, Artificial Sequence; identical to SEQ ID NO: 45116
  Description of Artificial Sequence: Synthetic casein;  5' sequence and inner sequence

SEQ ID NO: 49158 - DNA, 53 bp, Artificial Sequence; identical to SEQ ID NO: 29335
  Description of Artificial Sequence: Synthetic casein;  5' sequence and inner sequence

SEQ ID NO: 49159 - DNA, 53 bp, Artificial Sequence; identical to SEQ ID NO: 1303
  Description of Artificial Sequence: Synthetic casein;  5' sequence and inner sequence

SEQ ID NO: 49160 - DNA, 53 bp, Artificial Sequence; identical to SEQ ID NO: 1073
  Description of Artificial Sequence: Synthetic casein;  5' sequence and inner sequence

SEQ ID NO: 49161 - DNA, 53 bp, Artificial Sequence; identical to SEQ ID NO: 45678
  Description of Artificial Sequence: Synthetic casein;  5' sequence and inner sequence

SEQ ID NO: 49162 - DNA, 53 bp, Artificial Sequence; identical to SEQ ID NO: 29869
  Description of Artificial Sequence: Synthetic casein;  5' sequence and inner sequence

SEQ ID NO: 49163 - DNA, 53 bp, Artificial Sequence; identical to SEQ ID NO: 1272
  Description of Artificial Sequence: Synthetic casein;  5' sequence and inner sequence

SEQ ID NO: 49164 - DNA, 53 bp, Artificial Sequence; identical to SEQ ID NO: 29471
  Description of Artificial Sequence: Synthetic casein;  5' sequence and inner sequence

SEQ ID NO: 49165 - DNA, 53 bp, Artificial Sequence; identical to SEQ ID NO: 45127
  Description of Artificial Sequence: Synthetic casein;  5' sequence and inner sequence

SEQ ID NO: 49166 - DNA, 53 bp, Artificial Sequence; identical to SEQ ID NO: 29720
  Description of Artificial Sequence: Synthetic casein;  5' sequence and inner sequence

SEQ ID NO: 49167 - DNA, 53 bp, Artificial Sequence; identical to SEQ ID NO: 5707
  Description of Artificial Sequence: Synthetic casein;  5' sequence and inner sequence

SEQ ID NO: 49168 - DNA, 53 bp, Artificial Sequence; identical to SEQ ID NO: 5521
  Description of Artificial Sequence: Synthetic casein;  5' sequence and inner sequence

SEQ ID NO: 49169 - DNA, 53 bp, Artificial Sequence; identical to SEQ ID NO: 5336
  Description of Artificial Sequence: Synthetic casein;  5' sequence and inner sequence

SEQ ID NO: 49170 - DNA, 53 bp, Artificial Sequence; identical to SEQ ID NO: 29682
  Description of Artificial Sequence: Synthetic casein;  5' sequence and inner sequence

SEQ ID NO: 49171 - DNA, 53 bp, Artificial Sequence; identical to SEQ ID NO: 1161
  Description of Artificial Sequence: Synthetic casein;  5' sequence and inner sequence

SEQ ID NO: 49172 - DNA, 53 bp, Artificial Sequence; identical to SEQ ID NO: 1457
  Description of Artificial Sequence: Synthetic casein;  5' sequence and inner sequence

SEQ ID NO: 49173 - DNA, 53 bp, Artificial Sequence; identical to SEQ ID NO: 21869
  Description of Artificial Sequence: Synthetic casein;  5' sequence and inner sequence

SEQ ID NO: 49174 - DNA, 53 bp, Artificial Sequence; identical to SEQ ID NO: 29760
  Description of Artificial Sequence: Synthetic casein;  5' sequence and inner sequence

SEQ ID NO: 49175 - DNA, 53 bp, Artificial Sequence; identical to SEQ ID NO: 29971
  Description of Artificial Sequence: Synthetic casein;  5' sequence and inner sequence

SEQ ID NO: 49176 - DNA, 53 bp, Artificial Sequence; identical to SEQ ID NO: 45140
  Description of Artificial Sequence: Synthetic casein;  5' sequence and inner sequence

SEQ ID NO: 49177 - DNA, 53 bp, Artificial Sequence; identical to SEQ ID NO: 1022
  Description of Artificial Sequence: Synthetic casein;  5' sequence and inner sequence

SEQ ID NO: 49178 - DNA, 53 bp, Artificial Sequence; identical to SEQ ID NO: 29995
  Description of Artificial Sequence: Synthetic casein;  5' sequence and inner sequence

SEQ ID NO: 49179 - DNA, 54 bp, Artificial Sequence; identical to SEQ ID NO: 45761
  Description of Artificial Sequence: Synthetic casein;  5' sequence and inner sequence

SEQ ID NO: 49180 - DNA, 53 bp, Artificial Sequence; identical to SEQ ID NO: 1828
  Description of Artificial Sequence: Synthetic casein;  5' sequence and inner sequence

SEQ ID NO: 49181 - DNA, 53 bp, Artificial Sequence; identical to SEQ ID NO: 21551
  Description of Artificial Sequence: Synthetic casein;  5' sequence and inner sequence

SEQ ID NO: 49182 - DNA, 53 bp, Artificial Sequence; identical to SEQ ID NO: 29839
  Description of Artificial Sequence: Synthetic casein;  5' sequence and inner sequence

SEQ ID NO: 49183 - DNA, 53 bp, Artificial Sequence; identical to SEQ ID NO: 1617
  Description of Artificial Sequence: Synthetic casein;  5' sequence and inner sequence

SEQ ID NO: 49184 - DNA, 53 bp, Artificial Sequence; identical to SEQ ID NO: 45318
  Description of Artificial Sequence: Synthetic casein;  5' sequence and inner sequence

SEQ ID NO: 49185 - DNA, 53 bp, Artificial Sequence; identical to SEQ ID NO: 21504
  Description of Artificial Sequence: Synthetic casein;  5' sequence and inner sequence

SEQ ID NO: 49186 - DNA, 53 bp, Artificial Sequence; identical to SEQ ID NO: 1267
  Description of Artificial Sequence: Synthetic casein;  5' sequence and inner sequence

SEQ ID NO: 49187 - DNA, 53 bp, Artificial Sequence; identical to SEQ ID NO: 1727
  Description of Artificial Sequence: Synthetic casein;  5' sequence and inner sequence

SEQ ID NO: 49188 - DNA, 53 bp, Artificial Sequence; identical to SEQ ID NO: 45112
  Description of Artificial Sequence: Synthetic casein;  5' sequence and inner sequence

SEQ ID NO: 49189 - DNA, 53 bp, Artificial Sequence; identical to SEQ ID NO: 45227
  Description of Artificial Sequence: Synthetic casein;  5' sequence and inner sequence

SEQ ID NO: 49190 - DNA, 53 bp, Artificial Sequence; identical to SEQ ID NO: 45542
  Description of Artificial Sequence: Synthetic casein;  5' sequence and inner sequence

SEQ ID NO: 49191 - DNA, 48 bp, Artificial Sequence; identical to SEQ ID NO: 17927
  Description of Artificial Sequence: Synthetic casein;  5' sequence and inner sequence

SEQ ID NO: 49192 - DNA, 53 bp, Artificial Sequence; identical to SEQ ID NO: 45297
  Description of Artificial Sequence: Synthetic casein;  5' sequence and inner sequence

SEQ ID NO: 49193 - DNA, 53 bp, Artificial Sequence; identical to SEQ ID NO: 29557
  Description of Artificial Sequence: Synthetic casein;  5' sequence and inner sequence

SEQ ID NO: 49194 - DNA, 53 bp, Artificial Sequence; identical to SEQ ID NO: 17531
  Description of Artificial Sequence: Synthetic casein;  5' sequence and inner sequence

SEQ ID NO: 49195 - DNA, 53 bp, Artificial Sequence; identical to SEQ ID NO: 1077
  Description of Artificial Sequence: Synthetic casein;  5' sequence and inner sequence

SEQ ID NO: 49196 - DNA, 53 bp, Artificial Sequence; identical to SEQ ID NO: 29874
  Description of Artificial Sequence: Synthetic casein;  5' sequence and inner sequence

SEQ ID NO: 49197 - DNA, 53 bp, Artificial Sequence; identical to SEQ ID NO: 5571
  Description of Artificial Sequence: Synthetic casein;  5' sequence and inner sequence

SEQ ID NO: 49198 - DNA, 53 bp, Artificial Sequence
  Description of Artificial Sequence: Synthetic casein;  5' sequence and inner sequence
tagggaagagaaggacatatgatcgtacggaacggcacgtcctgtcctacgca

SEQ ID NO: 49199 - DNA, 53 bp, Artificial Sequence; identical to SEQ ID NO: 21984
  Description of Artificial Sequence: Synthetic casein;  5' sequence and inner sequence

SEQ ID NO: 49200 - DNA, 53 bp, Artificial Sequence; identical to SEQ ID NO: 1016
  Description of Artificial Sequence: Synthetic casein;  5' sequence and inner sequence

SEQ ID NO: 49201 - DNA, 53 bp, Artificial Sequence; identical to SEQ ID NO: 41829
  Description of Artificial Sequence: Synthetic casein;  5' sequence and inner sequence

SEQ ID NO: 49202 - DNA, 53 bp, Artificial Sequence; identical to SEQ ID NO: 17399
  Description of Artificial Sequence: Synthetic casein;  5' sequence and inner sequence

SEQ ID NO: 49203 - DNA, 53 bp, Artificial Sequence; identical to SEQ ID NO: 45777
  Description of Artificial Sequence: Synthetic casein;  5' sequence and inner sequence

SEQ ID NO: 49204 - DNA, 53 bp, Artificial Sequence; identical to SEQ ID NO: 45159
  Description of Artificial Sequence: Synthetic casein;  5' sequence and inner sequence

SEQ ID NO: 49205 - DNA, 53 bp, Artificial Sequence; identical to SEQ ID NO: 21518
  Description of Artificial Sequence: Synthetic casein;  5' sequence and inner sequence

SEQ ID NO: 49206 - DNA, 53 bp, Artificial Sequence; identical to SEQ ID NO: 1632
  Description of Artificial Sequence: Synthetic casein;  5' sequence and inner sequence

SEQ ID NO: 49207 - DNA, 52 bp, Artificial Sequence; identical to SEQ ID NO: 29565
  Description of Artificial Sequence: Synthetic casein;  5' sequence and inner sequence

SEQ ID NO: 49208 - DNA, 53 bp, Artificial Sequence; identical to SEQ ID NO: 1454
  Description of Artificial Sequence: Synthetic casein;  5' sequence and inner sequence

SEQ ID NO: 49209 - DNA, 53 bp, Artificial Sequence; identical to SEQ ID NO: 45166
  Description of Artificial Sequence: Synthetic casein;  5' sequence and inner sequence

SEQ ID NO: 49210 - DNA, 53 bp, Artificial Sequence; identical to SEQ ID NO: 1051
  Description of Artificial Sequence: Synthetic casein;  5' sequence and inner sequence

SEQ ID NO: 49211 - DNA, 53 bp, Artificial Sequence; identical to SEQ ID NO: 1228
  Description of Artificial Sequence: Synthetic casein;  5' sequence and inner sequence

SEQ ID NO: 49212 - DNA, 53 bp, Artificial Sequence; identical to SEQ ID NO: 5489
  Description of Artificial Sequence: Synthetic casein;  5' sequence and inner sequence

SEQ ID NO: 49213 - DNA, 53 bp, Artificial Sequence; identical to SEQ ID NO: 1232
  Description of Artificial Sequence: Synthetic casein;  5' sequence and inner sequence

SEQ ID NO: 49214 - DNA, 53 bp, Artificial Sequence; identical to SEQ ID NO: 45493
  Description of Artificial Sequence: Synthetic casein;  5' sequence and inner sequence

SEQ ID NO: 49215 - DNA, 53 bp, Artificial Sequence; identical to SEQ ID NO: 45191
  Description of Artificial Sequence: Synthetic casein;  5' sequence and inner sequence

SEQ ID NO: 49216 - DNA, 53 bp, Artificial Sequence; identical to SEQ ID NO: 29582
  Description of Artificial Sequence: Synthetic casein;  5' sequence and inner sequence

SEQ ID NO: 49217 - DNA, 53 bp, Artificial Sequence; identical to SEQ ID NO: 1352
  Description of Artificial Sequence: Synthetic casein;  5' sequence and inner sequence

SEQ ID NO: 49218 - DNA, 53 bp, Artificial Sequence; identical to SEQ ID NO: 1619
  Description of Artificial Sequence: Synthetic casein;  5' sequence and inner sequence

SEQ ID NO: 49219 - DNA, 53 bp, Artificial Sequence; identical to SEQ ID NO: 29735
  Description of Artificial Sequence: Synthetic casein;  5' sequence and inner sequence

SEQ ID NO: 49220 - DNA, 53 bp, Artificial Sequence; identical to SEQ ID NO: 21737
  Description of Artificial Sequence: Synthetic casein;  5' sequence and inner sequence

SEQ ID NO: 49221 - DNA, 53 bp, Artificial Sequence
  Description of Artificial Sequence: Synthetic casein;  5' sequence and inner sequence
tagggaagagaaggacatatgatgtcacgtcgtcacgcagcatgtacggcaca

SEQ ID NO: 49222 - DNA, 53 bp, Artificial Sequence; identical to SEQ ID NO: 1151
  Description of Artificial Sequence: Synthetic casein;  5' sequence and inner sequence

SEQ ID NO: 49223 - DNA, 53 bp, Artificial Sequence; identical to SEQ ID NO: 5940
  Description of Artificial Sequence: Synthetic casein;  5' sequence and inner sequence

SEQ ID NO: 49224 - DNA, 53 bp, Artificial Sequence; identical to SEQ ID NO: 21889
  Description of Artificial Sequence: Synthetic casein;  5' sequence and inner sequence

SEQ ID NO: 49225 - DNA, 53 bp, Artificial Sequence; identical to SEQ ID NO: 29432
  Description of Artificial Sequence: Synthetic casein;  5' sequence and inner sequence

SEQ ID NO: 49226 - DNA, 53 bp, Artificial Sequence; identical to SEQ ID NO: 1320
  Description of Artificial Sequence: Synthetic casein;  5' sequence and inner sequence

SEQ ID NO: 49227 - DNA, 53 bp, Artificial Sequence; identical to SEQ ID NO: 1891
  Description of Artificial Sequence: Synthetic casein;  5' sequence and inner sequence

SEQ ID NO: 49228 - DNA, 53 bp, Artificial Sequence; identical to SEQ ID NO: 45345
  Description of Artificial Sequence: Synthetic casein;  5' sequence and inner sequence

SEQ ID NO: 49229 - DNA, 53 bp, Artificial Sequence; identical to SEQ ID NO: 1149
  Description of Artificial Sequence: Synthetic casein;  5' sequence and inner sequence

SEQ ID NO: 49230 - DNA, 53 bp, Artificial Sequence; identical to SEQ ID NO: 21519
  Description of Artificial Sequence: Synthetic casein;  5' sequence and inner sequence

SEQ ID NO: 49231 - DNA, 53 bp, Artificial Sequence; identical to SEQ ID NO: 1227
  Description of Artificial Sequence: Synthetic casein;  5' sequence and inner sequence

SEQ ID NO: 49232 - DNA, 53 bp, Artificial Sequence; identical to SEQ ID NO: 45461
  Description of Artificial Sequence: Synthetic casein;  5' sequence and inner sequence

SEQ ID NO: 49233 - DNA, 53 bp, Artificial Sequence; identical to SEQ ID NO: 1192
  Description of Artificial Sequence: Synthetic casein;  5' sequence and inner sequence

SEQ ID NO: 49234 - DNA, 53 bp, Artificial Sequence; identical to SEQ ID NO: 45182
  Description of Artificial Sequence: Synthetic casein;  5' sequence and inner sequence

SEQ ID NO: 49235 - DNA, 53 bp, Artificial Sequence; identical to SEQ ID NO: 21324
  Description of Artificial Sequence: Synthetic casein;  5' sequence and inner sequence

SEQ ID NO: 49236 - DNA, 53 bp, Artificial Sequence; identical to SEQ ID NO: 1131
  Description of Artificial Sequence: Synthetic casein;  5' sequence and inner sequence

SEQ ID NO: 49237 - DNA, 53 bp, Artificial Sequence; identical to SEQ ID NO: 1321
  Description of Artificial Sequence: Synthetic casein;  5' sequence and inner sequence

SEQ ID NO: 49238 - DNA, 52 bp, Artificial Sequence; identical to SEQ ID NO: 29660
  Description of Artificial Sequence: Synthetic casein;  5' sequence and inner sequence

SEQ ID NO: 49239 - DNA, 53 bp, Artificial Sequence; identical to SEQ ID NO: 29315
  Description of Artificial Sequence: Synthetic casein;  5' sequence and inner sequence

SEQ ID NO: 49240 - DNA, 53 bp, Artificial Sequence; identical to SEQ ID NO: 9910
  Description of Artificial Sequence: Synthetic casein;  5' sequence and inner sequence

SEQ ID NO: 49241 - DNA, 53 bp, Artificial Sequence; identical to SEQ ID NO: 1190
  Description of Artificial Sequence: Synthetic casein;  5' sequence and inner sequence

SEQ ID NO: 49242 - DNA, 53 bp, Artificial Sequence; identical to SEQ ID NO: 1207
  Description of Artificial Sequence: Synthetic casein;  5' sequence and inner sequence

SEQ ID NO: 49243 - DNA, 53 bp, Artificial Sequence; identical to SEQ ID NO: 45722
  Description of Artificial Sequence: Synthetic casein;  5' sequence and inner sequence

SEQ ID NO: 49244 - DNA, 53 bp, Artificial Sequence; identical to SEQ ID NO: 17978
  Description of Artificial Sequence: Synthetic casein;  5' sequence and inner sequence

SEQ ID NO: 49245 - DNA, 53 bp, Artificial Sequence; identical to SEQ ID NO: 29173
  Description of Artificial Sequence: Synthetic casein;  5' sequence and inner sequence

SEQ ID NO: 49246 - DNA, 53 bp, Artificial Sequence
  Description of Artificial Sequence: Synthetic casein;  5' sequence and inner sequence
tagggaagagaaggacatatgatgatgcgtcacgtaaccgtccttgcgtcacg

SEQ ID NO: 49247 - DNA, 53 bp, Artificial Sequence
  Description of Artificial Sequence: Synthetic casein;  5' sequence and inner sequence
tagggaagagaaggacatatgatgcgtcacgatgcgacggtatggactgcgtg

SEQ ID NO: 49248 - DNA, 53 bp, Artificial Sequence; identical to SEQ ID NO: 21302
  Description of Artificial Sequence: Synthetic casein;  5' sequence and inner sequence

SEQ ID NO: 49249 - DNA, 53 bp, Artificial Sequence; identical to SEQ ID NO: 1644
  Description of Artificial Sequence: Synthetic casein;  5' sequence and inner sequence

SEQ ID NO: 49250 - DNA, 53 bp, Artificial Sequence
  Description of Artificial Sequence: Synthetic casein;  5' sequence and inner sequence
tagggaagagaaggacatatgatgcacgatacgtacctgctatgtacgtcacg

SEQ ID NO: 49251 - DNA, 53 bp, Artificial Sequence; identical to SEQ ID NO: 17861
  Description of Artificial Sequence: Synthetic casein;  5' sequence and inner sequence

SEQ ID NO: 49252 - DNA, 53 bp, Artificial Sequence; identical to SEQ ID NO: 29688
  Description of Artificial Sequence: Synthetic casein;  5' sequence and inner sequence

SEQ ID NO: 49253 - DNA, 53 bp, Artificial Sequence; identical to SEQ ID NO: 1728
  Description of Artificial Sequence: Synthetic casein;  5' sequence and inner sequence

SEQ ID NO: 49254 - DNA, 53 bp, Artificial Sequence; identical to SEQ ID NO: 29555
  Description of Artificial Sequence: Synthetic casein;  5' sequence and inner sequence

SEQ ID NO: 49255 - DNA, 53 bp, Artificial Sequence; identical to SEQ ID NO: 1274
  Description of Artificial Sequence: Synthetic casein;  5' sequence and inner sequence

SEQ ID NO: 49256 - DNA, 53 bp, Artificial Sequence; identical to SEQ ID NO: 29960
  Description of Artificial Sequence: Synthetic casein;  5' sequence and inner sequence

SEQ ID NO: 49257 - DNA, 53 bp, Artificial Sequence; identical to SEQ ID NO: 45582
  Description of Artificial Sequence: Synthetic casein;  5' sequence and inner sequence

SEQ ID NO: 49258 - DNA, 53 bp, Artificial Sequence; identical to SEQ ID NO: 17513
  Description of Artificial Sequence: Synthetic casein;  5' sequence and inner sequence

SEQ ID NO: 49259 - DNA, 53 bp, Artificial Sequence; identical to SEQ ID NO: 1372
  Description of Artificial Sequence: Synthetic casein;  5' sequence and inner sequence

SEQ ID NO: 49260 - DNA, 53 bp, Artificial Sequence; identical to SEQ ID NO: 1256
  Description of Artificial Sequence: Synthetic casein;  5' sequence and inner sequence

SEQ ID NO: 49261 - DNA, 53 bp, Artificial Sequence; identical to SEQ ID NO: 1204
  Description of Artificial Sequence: Synthetic casein;  5' sequence and inner sequence

SEQ ID NO: 49262 - DNA, 53 bp, Artificial Sequence; identical to SEQ ID NO: 45237
  Description of Artificial Sequence: Synthetic casein;  5' sequence and inner sequence

SEQ ID NO: 49263 - DNA, 53 bp, Artificial Sequence; identical to SEQ ID NO: 29978
  Description of Artificial Sequence: Synthetic casein;  5' sequence and inner sequence

SEQ ID NO: 49264 - DNA, 53 bp, Artificial Sequence; identical to SEQ ID NO: 1249
  Description of Artificial Sequence: Synthetic casein;  5' sequence and inner sequence

SEQ ID NO: 49265 - DNA, 53 bp, Artificial Sequence; identical to SEQ ID NO: 29924
  Description of Artificial Sequence: Synthetic casein;  5' sequence and inner sequence

SEQ ID NO: 49266 - DNA, 53 bp, Artificial Sequence; identical to SEQ ID NO: 45348
  Description of Artificial Sequence: Synthetic casein;  5' sequence and inner sequence

SEQ ID NO: 49267 - DNA, 53 bp, Artificial Sequence; identical to SEQ ID NO: 29158
  Description of Artificial Sequence: Synthetic casein;  5' sequence and inner sequence

SEQ ID NO: 49268 - DNA, 53 bp, Artificial Sequence; identical to SEQ ID NO: 1115
  Description of Artificial Sequence: Synthetic casein;  5' sequence and inner sequence

SEQ ID NO: 49269 - DNA, 53 bp, Artificial Sequence; identical to SEQ ID NO: 1397
  Description of Artificial Sequence: Synthetic casein;  5' sequence and inner sequence

SEQ ID NO: 49270 - DNA, 53 bp, Artificial Sequence; identical to SEQ ID NO: 21560
  Description of Artificial Sequence: Synthetic casein;  5' sequence and inner sequence

SEQ ID NO: 49271 - DNA, 49 bp, Artificial Sequence; identical to SEQ ID NO: 1893
  Description of Artificial Sequence: Synthetic casein;  5' sequence and inner sequence

SEQ ID NO: 49272 - DNA, 53 bp, Artificial Sequence; identical to SEQ ID NO: 29808
  Description of Artificial Sequence: Synthetic casein;  5' sequence and inner sequence

SEQ ID NO: 49273 - DNA, 53 bp, Artificial Sequence; identical to SEQ ID NO: 45698
  Description of Artificial Sequence: Synthetic casein;  5' sequence and inner sequence

SEQ ID NO: 49274 - DNA, 51 bp, Artificial Sequence; identical to SEQ ID NO: 5786
  Description of Artificial Sequence: Synthetic casein;  5' sequence and inner sequence

SEQ ID NO: 49275 - DNA, 53 bp, Artificial Sequence; identical to SEQ ID NO: 29693
  Description of Artificial Sequence: Synthetic casein;  5' sequence and inner sequence

SEQ ID NO: 49276 - DNA, 53 bp, Artificial Sequence; identical to SEQ ID NO: 29996
  Description of Artificial Sequence: Synthetic casein;  5' sequence and inner sequence

SEQ ID NO: 49277 - DNA, 53 bp, Artificial Sequence; identical to SEQ ID NO: 29416
  Description of Artificial Sequence: Synthetic casein;  5' sequence and inner sequence

SEQ ID NO: 49278 - DNA, 53 bp, Artificial Sequence; identical to SEQ ID NO: 21836
  Description of Artificial Sequence: Synthetic casein;  5' sequence and inner sequence

SEQ ID NO: 49279 - DNA, 53 bp, Artificial Sequence; identical to SEQ ID NO: 1031
  Description of Artificial Sequence: Synthetic casein;  5' sequence and inner sequence

SEQ ID NO: 49280 - DNA, 52 bp, Artificial Sequence; identical to SEQ ID NO: 45435
  Description of Artificial Sequence: Synthetic casein;  5' sequence and inner sequence

SEQ ID NO: 49281 - DNA, 53 bp, Artificial Sequence; identical to SEQ ID NO: 17819
  Description of Artificial Sequence: Synthetic casein;  5' sequence and inner sequence

SEQ ID NO: 49282 - DNA, 53 bp, Artificial Sequence; identical to SEQ ID NO: 29959
  Description of Artificial Sequence: Synthetic casein;  5' sequence and inner sequence

SEQ ID NO: 49283 - DNA, 53 bp, Artificial Sequence; identical to SEQ ID NO: 1177
  Description of Artificial Sequence: Synthetic casein;  5' sequence and inner sequence

SEQ ID NO: 49284 - DNA, 53 bp, Artificial Sequence; identical to SEQ ID NO: 29934
  Description of Artificial Sequence: Synthetic casein;  5' sequence and inner sequence

SEQ ID NO: 49285 - DNA, 53 bp, Artificial Sequence; identical to SEQ ID NO: 45479
  Description of Artificial Sequence: Synthetic casein;  5' sequence and inner sequence

SEQ ID NO: 49286 - DNA, 53 bp, Artificial Sequence; identical to SEQ ID NO: 1776
  Description of Artificial Sequence: Synthetic casein;  5' sequence and inner sequence

SEQ ID NO: 49287 - DNA, 53 bp, Artificial Sequence; identical to SEQ ID NO: 29793
  Description of Artificial Sequence: Synthetic casein;  5' sequence and inner sequence

SEQ ID NO: 49288 - DNA, 53 bp, Artificial Sequence; identical to SEQ ID NO: 45490
  Description of Artificial Sequence: Synthetic casein;  5' sequence and inner sequence

SEQ ID NO: 49289 - DNA, 53 bp, Artificial Sequence; identical to SEQ ID NO: 29754
  Description of Artificial Sequence: Synthetic casein;  5' sequence and inner sequence

SEQ ID NO: 49290 - DNA, 53 bp, Artificial Sequence; identical to SEQ ID NO: 1884
  Description of Artificial Sequence: Synthetic casein;  5' sequence and inner sequence

SEQ ID NO: 49291 - DNA, 53 bp, Artificial Sequence; identical to SEQ ID NO: 1114
  Description of Artificial Sequence: Synthetic casein;  5' sequence and inner sequence

SEQ ID NO: 49292 - DNA, 53 bp, Artificial Sequence
  Description of Artificial Sequence: Synthetic casein;  5' sequence and inner sequence
tagggaagagaaggacatatgatgcgtcacgccacatgtacgtatgcgtcacg

SEQ ID NO: 49293 - DNA, 53 bp, Artificial Sequence; identical to SEQ ID NO: 45819
  Description of Artificial Sequence: Synthetic casein;  5' sequence and inner sequence

SEQ ID NO: 49294 - DNA, 53 bp, Artificial Sequence; identical to SEQ ID NO: 1909
  Description of Artificial Sequence: Synthetic casein;  5' sequence and inner sequence

SEQ ID NO: 49295 - DNA, 53 bp, Artificial Sequence; identical to SEQ ID NO: 1591
  Description of Artificial Sequence: Synthetic casein;  5' sequence and inner sequence

SEQ ID NO: 49296 - DNA, 53 bp, Artificial Sequence; identical to SEQ ID NO: 1955
  Description of Artificial Sequence: Synthetic casein;  5' sequence and inner sequence

SEQ ID NO: 49297 - DNA, 53 bp, Artificial Sequence; identical to SEQ ID NO: 45344
  Description of Artificial Sequence: Synthetic casein;  5' sequence and inner sequence

SEQ ID NO: 49298 - DNA, 53 bp, Artificial Sequence; identical to SEQ ID NO: 17703
  Description of Artificial Sequence: Synthetic casein;  5' sequence and inner sequence

SEQ ID NO: 49299 - DNA, 53 bp, Artificial Sequence; identical to SEQ ID NO: 45744
  Description of Artificial Sequence: Synthetic casein;  5' sequence and inner sequence

SEQ ID NO: 49300 - DNA, 53 bp, Artificial Sequence; identical to SEQ ID NO: 45439
  Description of Artificial Sequence: Synthetic casein;  5' sequence and inner sequence

SEQ ID NO: 49301 - DNA, 53 bp, Artificial Sequence; identical to SEQ ID NO: 5743
  Description of Artificial Sequence: Synthetic casein;  5' sequence and inner sequence

SEQ ID NO: 49302 - DNA, 53 bp, Artificial Sequence; identical to SEQ ID NO: 1358
  Description of Artificial Sequence: Synthetic casein;  5' sequence and inner sequence

SEQ ID NO: 49303 - DNA, 53 bp, Artificial Sequence; identical to SEQ ID NO: 29603
  Description of Artificial Sequence: Synthetic casein;  5' sequence and inner sequence

SEQ ID NO: 49304 - DNA, 53 bp, Artificial Sequence; identical to SEQ ID NO: 1901
  Description of Artificial Sequence: Synthetic casein;  5' sequence and inner sequence

SEQ ID NO: 49305 - DNA, 53 bp, Artificial Sequence; identical to SEQ ID NO: 5620
  Description of Artificial Sequence: Synthetic casein;  5' sequence and inner sequence

SEQ ID NO: 49306 - DNA, 49 bp, Artificial Sequence
  Description of Artificial Sequence: Synthetic casein;  5' sequence and inner sequence
tagggaagagaaggacatatgatggacgcaacgtaccgccgtggccatg

SEQ ID NO: 49307 - DNA, 53 bp, Artificial Sequence; identical to SEQ ID NO: 1144
  Description of Artificial Sequence: Synthetic casein;  5' sequence and inner sequence

SEQ ID NO: 49308 - DNA, 53 bp, Artificial Sequence; identical to SEQ ID NO: 45614
  Description of Artificial Sequence: Synthetic casein;  5' sequence and inner sequence

SEQ ID NO: 49309 - DNA, 53 bp, Artificial Sequence; identical to SEQ ID NO: 1351
  Description of Artificial Sequence: Synthetic casein;  5' sequence and inner sequence

SEQ ID NO: 49310 - DNA, 53 bp, Artificial Sequence; identical to SEQ ID NO: 1137
  Description of Artificial Sequence: Synthetic casein;  5' sequence and inner sequence

SEQ ID NO: 49311 - DNA, 53 bp, Artificial Sequence; identical to SEQ ID NO: 1823
  Description of Artificial Sequence: Synthetic casein;  5' sequence and inner sequence

SEQ ID NO: 49312 - DNA, 53 bp, Artificial Sequence; identical to SEQ ID NO: 29744
  Description of Artificial Sequence: Synthetic casein;  5' sequence and inner sequence

SEQ ID NO: 49313 - DNA, 53 bp, Artificial Sequence; identical to SEQ ID NO: 25984
  Description of Artificial Sequence: Synthetic casein;  5' sequence and inner sequence

SEQ ID NO: 49314 - DNA, 53 bp, Artificial Sequence; identical to SEQ ID NO: 1615
  Description of Artificial Sequence: Synthetic casein;  5' sequence and inner sequence

SEQ ID NO: 49315 - DNA, 53 bp, Artificial Sequence; identical to SEQ ID NO: 45251
  Description of Artificial Sequence: Synthetic casein;  5' sequence and inner sequence

SEQ ID NO: 49316 - DNA, 53 bp, Artificial Sequence; identical to SEQ ID NO: 29516
  Description of Artificial Sequence: Synthetic casein;  5' sequence and inner sequence

SEQ ID NO: 49317 - DNA, 53 bp, Artificial Sequence; identical to SEQ ID NO: 21478
  Description of Artificial Sequence: Synthetic casein;  5' sequence and inner sequence

SEQ ID NO: 49318 - DNA, 53 bp, Artificial Sequence; identical to SEQ ID NO: 29591
  Description of Artificial Sequence: Synthetic casein;  5' sequence and inner sequence

SEQ ID NO: 49319 - DNA, 53 bp, Artificial Sequence; identical to SEQ ID NO: 21466
  Description of Artificial Sequence: Synthetic casein;  5' sequence and inner sequence

SEQ ID NO: 49320 - DNA, 53 bp, Artificial Sequence; identical to SEQ ID NO: 1060
  Description of Artificial Sequence: Synthetic casein;  5' sequence and inner sequence

SEQ ID NO: 49321 - DNA, 53 bp, Artificial Sequence; identical to SEQ ID NO: 1289
  Description of Artificial Sequence: Synthetic casein;  5' sequence and inner sequence

SEQ ID NO: 49322 - DNA, 53 bp, Artificial Sequence
  Description of Artificial Sequence: Synthetic casein;  5' sequence and inner sequence
tagggaagagaaggacatatgatcgttgcgcacgcacgtcatgtggatgcacg

SEQ ID NO: 49323 - DNA, 53 bp, Artificial Sequence; identical to SEQ ID NO: 21769
  Description of Artificial Sequence: Synthetic casein;  5' sequence and inner sequence

SEQ ID NO: 49324 - DNA, 53 bp, Artificial Sequence; identical to SEQ ID NO: 1038
  Description of Artificial Sequence: Synthetic casein;  5' sequence and inner sequence

SEQ ID NO: 49325 - DNA, 53 bp, Artificial Sequence; identical to SEQ ID NO: 5938
  Description of Artificial Sequence: Synthetic casein;  5' sequence and inner sequence

SEQ ID NO: 49326 - DNA, 53 bp, Artificial Sequence; identical to SEQ ID NO: 1225
  Description of Artificial Sequence: Synthetic casein;  5' sequence and inner sequence

SEQ ID NO: 49327 - DNA, 53 bp, Artificial Sequence; identical to SEQ ID NO: 1244
  Description of Artificial Sequence: Synthetic casein;  5' sequence and inner sequence

SEQ ID NO: 49328 - DNA, 53 bp, Artificial Sequence; identical to SEQ ID NO: 5960
  Description of Artificial Sequence: Synthetic casein;  5' sequence and inner sequence

SEQ ID NO: 49329 - DNA, 53 bp, Artificial Sequence; identical to SEQ ID NO: 21811
  Description of Artificial Sequence: Synthetic casein;  5' sequence and inner sequence

SEQ ID NO: 49330 - DNA, 53 bp, Artificial Sequence; identical to SEQ ID NO: 17948
  Description of Artificial Sequence: Synthetic casein;  5' sequence and inner sequence

SEQ ID NO: 49331 - DNA, 53 bp, Artificial Sequence; identical to SEQ ID NO: 45472
  Description of Artificial Sequence: Synthetic casein;  5' sequence and inner sequence

SEQ ID NO: 49332 - DNA, 53 bp, Artificial Sequence; identical to SEQ ID NO: 1367
  Description of Artificial Sequence: Synthetic casein;  5' sequence and inner sequence

SEQ ID NO: 49333 - DNA, 53 bp, Artificial Sequence; identical to SEQ ID NO: 29114
  Description of Artificial Sequence: Synthetic casein;  5' sequence and inner sequence

SEQ ID NO: 49334 - DNA, 53 bp, Artificial Sequence; identical to SEQ ID NO: 1141
  Description of Artificial Sequence: Synthetic casein;  5' sequence and inner sequence

SEQ ID NO: 49335 - DNA, 53 bp, Artificial Sequence; identical to SEQ ID NO: 29747
  Description of Artificial Sequence: Synthetic casein;  5' sequence and inner sequence

SEQ ID NO: 49336 - DNA, 53 bp, Artificial Sequence; identical to SEQ ID NO: 17585
  Description of Artificial Sequence: Synthetic casein;  5' sequence and inner sequence

SEQ ID NO: 49337 - DNA, 53 bp, Artificial Sequence; identical to SEQ ID NO: 1706
  Description of Artificial Sequence: Synthetic casein;  5' sequence and inner sequence

SEQ ID NO: 49338 - DNA, 53 bp, Artificial Sequence; identical to SEQ ID NO: 1780
  Description of Artificial Sequence: Synthetic casein;  5' sequence and inner sequence

SEQ ID NO: 49339 - DNA, 53 bp, Artificial Sequence; identical to SEQ ID NO: 45293
  Description of Artificial Sequence: Synthetic casein;  5' sequence and inner sequence

SEQ ID NO: 49340 - DNA, 53 bp, Artificial Sequence; identical to SEQ ID NO: 1117
  Description of Artificial Sequence: Synthetic casein;  5' sequence and inner sequence

SEQ ID NO: 49341 - DNA, 53 bp, Artificial Sequence; identical to SEQ ID NO: 1344
  Description of Artificial Sequence: Synthetic casein;  5' sequence and inner sequence

SEQ ID NO: 49342 - DNA, 53 bp, Artificial Sequence; identical to SEQ ID NO: 1860
  Description of Artificial Sequence: Synthetic casein;  5' sequence and inner sequence

SEQ ID NO: 49343 - DNA, 53 bp, Artificial Sequence; identical to SEQ ID NO: 29389
  Description of Artificial Sequence: Synthetic casein;  5' sequence and inner sequence

SEQ ID NO: 49344 - DNA, 53 bp, Artificial Sequence; identical to SEQ ID NO: 5638
  Description of Artificial Sequence: Synthetic casein;  5' sequence and inner sequence

SEQ ID NO: 49345 - DNA, 53 bp, Artificial Sequence; identical to SEQ ID NO: 1290
  Description of Artificial Sequence: Synthetic casein;  5' sequence and inner sequence

SEQ ID NO: 49346 - DNA, 53 bp, Artificial Sequence; identical to SEQ ID NO: 1074
  Description of Artificial Sequence: Synthetic casein;  5' sequence and inner sequence

SEQ ID NO: 49347 - DNA, 53 bp, Artificial Sequence; identical to SEQ ID NO: 21613
  Description of Artificial Sequence: Synthetic casein;  5' sequence and inner sequence

SEQ ID NO: 49348 - DNA, 53 bp, Artificial Sequence; identical to SEQ ID NO: 1877
  Description of Artificial Sequence: Synthetic casein;  5' sequence and inner sequence

SEQ ID NO: 49349 - DNA, 53 bp, Artificial Sequence; identical to SEQ ID NO: 1246
  Description of Artificial Sequence: Synthetic casein;  5' sequence and inner sequence

SEQ ID NO: 49350 - DNA, 53 bp, Artificial Sequence; identical to SEQ ID NO: 21730
  Description of Artificial Sequence: Synthetic casein;  5' sequence and inner sequence

SEQ ID NO: 49351 - DNA, 53 bp, Artificial Sequence
  Description of Artificial Sequence: Synthetic casein;  5' sequence and inner sequence
tagggaagagaaggacatatgatacgtgcgtacgcgtcgtgacgtactgcgtg

SEQ ID NO: 49352 - DNA, 53 bp, Artificial Sequence; identical to SEQ ID NO: 1248
  Description of Artificial Sequence: Synthetic casein;  5' sequence and inner sequence

SEQ ID NO: 49353 - DNA, 53 bp, Artificial Sequence; identical to SEQ ID NO: 29780
  Description of Artificial Sequence: Synthetic casein;  5' sequence and inner sequence

SEQ ID NO: 49354 - DNA, 53 bp, Artificial Sequence; identical to SEQ ID NO: 17906
  Description of Artificial Sequence: Synthetic casein;  5' sequence and inner sequence

SEQ ID NO: 49355 - DNA, 53 bp, Artificial Sequence; identical to SEQ ID NO: 29909
  Description of Artificial Sequence: Synthetic casein;  5' sequence and inner sequence

SEQ ID NO: 49356 - DNA, 53 bp, Artificial Sequence; identical to SEQ ID NO: 45256
  Description of Artificial Sequence: Synthetic casein;  5' sequence and inner sequence

SEQ ID NO: 49357 - DNA, 53 bp, Artificial Sequence; identical to SEQ ID NO: 45314
  Description of Artificial Sequence: Synthetic casein;  5' sequence and inner sequence

SEQ ID NO: 49358 - DNA, 53 bp, Artificial Sequence; identical to SEQ ID NO: 17504
  Description of Artificial Sequence: Synthetic casein;  5' sequence and inner sequence

SEQ ID NO: 49359 - DNA, 53 bp, Artificial Sequence; identical to SEQ ID NO: 9946
  Description of Artificial Sequence: Synthetic casein;  5' sequence and inner sequence

SEQ ID NO: 49360 - DNA, 53 bp, Artificial Sequence; identical to SEQ ID NO: 45214
  Description of Artificial Sequence: Synthetic casein;  5' sequence and inner sequence

SEQ ID NO: 49361 - DNA, 53 bp, Artificial Sequence; identical to SEQ ID NO: 1169
  Description of Artificial Sequence: Synthetic casein;  5' sequence and inner sequence

SEQ ID NO: 49362 - DNA, 53 bp, Artificial Sequence; identical to SEQ ID NO: 45189
  Description of Artificial Sequence: Synthetic casein;  5' sequence and inner sequence

SEQ ID NO: 49363 - DNA, 53 bp, Artificial Sequence; identical to SEQ ID NO: 9810
  Description of Artificial Sequence: Synthetic casein;  5' sequence and inner sequence

SEQ ID NO: 49364 - DNA, 53 bp, Artificial Sequence; identical to SEQ ID NO: 45741
  Description of Artificial Sequence: Synthetic casein;  5' sequence and inner sequence

SEQ ID NO: 49365 - DNA, 53 bp, Artificial Sequence; identical to SEQ ID NO: 29957
  Description of Artificial Sequence: Synthetic casein;  5' sequence and inner sequence

SEQ ID NO: 49366 - DNA, 53 bp, Artificial Sequence; identical to SEQ ID NO: 17342
  Description of Artificial Sequence: Synthetic casein;  5' sequence and inner sequence

SEQ ID NO: 49367 - DNA, 53 bp, Artificial Sequence; identical to SEQ ID NO: 45983
  Description of Artificial Sequence: Synthetic casein;  5' sequence and inner sequence

SEQ ID NO: 49368 - DNA, 53 bp, Artificial Sequence; identical to SEQ ID NO: 1326
  Description of Artificial Sequence: Synthetic casein;  5' sequence and inner sequence

SEQ ID NO: 49369 - DNA, 53 bp, Artificial Sequence; identical to SEQ ID NO: 29993
  Description of Artificial Sequence: Synthetic casein;  5' sequence and inner sequence

SEQ ID NO: 49370 - DNA, 53 bp, Artificial Sequence; identical to SEQ ID NO: 29964
  Description of Artificial Sequence: Synthetic casein;  5' sequence and inner sequence

SEQ ID NO: 49371 - DNA, 55 bp, Artificial Sequence; identical to SEQ ID NO: 45452
  Description of Artificial Sequence: Synthetic casein;  5' sequence and inner sequence

SEQ ID NO: 49372 - DNA, 53 bp, Artificial Sequence; identical to SEQ ID NO: 1042
  Description of Artificial Sequence: Synthetic casein;  5' sequence and inner sequence

SEQ ID NO: 49373 - DNA, 53 bp, Artificial Sequence; identical to SEQ ID NO: 45372
  Description of Artificial Sequence: Synthetic casein;  5' sequence and inner sequence

SEQ ID NO: 49374 - DNA, 53 bp, Artificial Sequence; identical to SEQ ID NO: 1104
  Description of Artificial Sequence: Synthetic casein;  5' sequence and inner sequence

SEQ ID NO: 49375 - DNA, 53 bp, Artificial Sequence; identical to SEQ ID NO: 29921
  Description of Artificial Sequence: Synthetic casein;  5' sequence and inner sequence

SEQ ID NO: 49376 - DNA, 53 bp, Artificial Sequence; identical to SEQ ID NO: 1560
  Description of Artificial Sequence: Synthetic casein;  5' sequence and inner sequence

SEQ ID NO: 49377 - DNA, 53 bp, Artificial Sequence; identical to SEQ ID NO: 1493
  Description of Artificial Sequence: Synthetic casein;  5' sequence and inner sequence

SEQ ID NO: 49378 - DNA, 53 bp, Artificial Sequence; identical to SEQ ID NO: 17862
  Description of Artificial Sequence: Synthetic casein;  5' sequence and inner sequence

SEQ ID NO: 49379 - DNA, 53 bp, Artificial Sequence; identical to SEQ ID NO: 5621
  Description of Artificial Sequence: Synthetic casein;  5' sequence and inner sequence

SEQ ID NO: 49380 - DNA, 53 bp, Artificial Sequence; identical to SEQ ID NO: 29739
  Description of Artificial Sequence: Synthetic casein;  5' sequence and inner sequence

SEQ ID NO: 49381 - DNA, 53 bp, Artificial Sequence; identical to SEQ ID NO: 1082
  Description of Artificial Sequence: Synthetic casein;  5' sequence and inner sequence

SEQ ID NO: 49382 - DNA, 53 bp, Artificial Sequence
  Description of Artificial Sequence: Synthetic casein;  5' sequence and inner sequence
tagggaagagaaggacatatgatggacgcaacgtaccgtatcatgtaggcatg

SEQ ID NO: 49383 - DNA, 53 bp, Artificial Sequence; identical to SEQ ID NO: 29805
  Description of Artificial Sequence: Synthetic casein;  5' sequence and inner sequence

SEQ ID NO: 49384 - DNA, 53 bp, Artificial Sequence; identical to SEQ ID NO: 45385
  Description of Artificial Sequence: Synthetic casein;  5' sequence and inner sequence

SEQ ID NO: 49385 - DNA, 53 bp, Artificial Sequence; identical to SEQ ID NO: 1050
  Description of Artificial Sequence: Synthetic casein;  5' sequence and inner sequence

SEQ ID NO: 49386 - DNA, 53 bp, Artificial Sequence; identical to SEQ ID NO: 45507
  Description of Artificial Sequence: Synthetic casein;  5' sequence and inner sequence

SEQ ID NO: 49387 - DNA, 51 bp, Artificial Sequence
  Description of Artificial Sequence: Synthetic casein;  5' sequence and inner sequence
tagggaagagaaggacatatgatggacgcaacgtaccttatcgtggccatg

SEQ ID NO: 49388 - DNA, 53 bp, Artificial Sequence; identical to SEQ ID NO: 45305
  Description of Artificial Sequence: Synthetic casein;  5' sequence and inner sequence

SEQ ID NO: 49389 - DNA, 53 bp, Artificial Sequence; identical to SEQ ID NO: 1098
  Description of Artificial Sequence: Synthetic casein;  5' sequence and inner sequence

SEQ ID NO: 49390 - DNA, 53 bp, Artificial Sequence; identical to SEQ ID NO: 21722
  Description of Artificial Sequence: Synthetic casein;  5' sequence and inner sequence

SEQ ID NO: 49391 - DNA, 53 bp, Artificial Sequence; identical to SEQ ID NO: 29312
  Description of Artificial Sequence: Synthetic casein;  5' sequence and inner sequence

SEQ ID NO: 49392 - DNA, 53 bp, Artificial Sequence; identical to SEQ ID NO: 5576
  Description of Artificial Sequence: Synthetic casein;  5' sequence and inner sequence

SEQ ID NO: 49393 - DNA, 53 bp, Artificial Sequence; identical to SEQ ID NO: 29503
  Description of Artificial Sequence: Synthetic casein;  5' sequence and inner sequence

SEQ ID NO: 49394 - DNA, 53 bp, Artificial Sequence; identical to SEQ ID NO: 33384
  Description of Artificial Sequence: Synthetic casein;  5' sequence and inner sequence

SEQ ID NO: 49395 - DNA, 53 bp, Artificial Sequence; identical to SEQ ID NO: 45657
  Description of Artificial Sequence: Synthetic casein;  5' sequence and inner sequence

SEQ ID NO: 49396 - DNA, 53 bp, Artificial Sequence; identical to SEQ ID NO: 21983
  Description of Artificial Sequence: Synthetic casein;  5' sequence and inner sequence

SEQ ID NO: 49397 - DNA, 53 bp, Artificial Sequence; identical to SEQ ID NO: 1152
  Description of Artificial Sequence: Synthetic casein;  5' sequence and inner sequence

SEQ ID NO: 49398 - DNA, 53 bp, Artificial Sequence; identical to SEQ ID NO: 45846
  Description of Artificial Sequence: Synthetic casein;  5' sequence and inner sequence

SEQ ID NO: 49399 - DNA, 53 bp, Artificial Sequence; identical to SEQ ID NO: 1634
  Description of Artificial Sequence: Synthetic casein;  5' sequence and inner sequence

SEQ ID NO: 49400 - DNA, 53 bp, Artificial Sequence; identical to SEQ ID NO: 45225
  Description of Artificial Sequence: Synthetic casein;  5' sequence and inner sequence

SEQ ID NO: 49401 - DNA, 53 bp, Artificial Sequence; identical to SEQ ID NO: 45547
  Description of Artificial Sequence: Synthetic casein;  5' sequence and inner sequence

SEQ ID NO: 49402 - DNA, 53 bp, Artificial Sequence; identical to SEQ ID NO: 1857
  Description of Artificial Sequence: Synthetic casein;  5' sequence and inner sequence

SEQ ID NO: 49403 - DNA, 53 bp, Artificial Sequence; identical to SEQ ID NO: 5579
  Description of Artificial Sequence: Synthetic casein;  5' sequence and inner sequence

SEQ ID NO: 49404 - DNA, 53 bp, Artificial Sequence; identical to SEQ ID NO: 1236
  Description of Artificial Sequence: Synthetic casein;  5' sequence and inner sequence

SEQ ID NO: 49405 - DNA, 53 bp, Artificial Sequence; identical to SEQ ID NO: 1291
  Description of Artificial Sequence: Synthetic casein;  5' sequence and inner sequence

SEQ ID NO: 49406 - DNA, 53 bp, Artificial Sequence; identical to SEQ ID NO: 45465
  Description of Artificial Sequence: Synthetic casein;  5' sequence and inner sequence

SEQ ID NO: 49407 - DNA, 53 bp, Artificial Sequence
  Description of Artificial Sequence: Synthetic casein;  5' sequence and inner sequence
tagggaagagaaggacatatgatgcgtcacggatcatgcgtacgtatcgtgcg

SEQ ID NO: 49408 - DNA, 53 bp, Artificial Sequence; identical to SEQ ID NO: 45388
  Description of Artificial Sequence: Synthetic casein;  5' sequence and inner sequence

SEQ ID NO: 49409 - DNA, 53 bp, Artificial Sequence; identical to SEQ ID NO: 45509
  Description of Artificial Sequence: Synthetic casein;  5' sequence and inner sequence

SEQ ID NO: 49410 - DNA, 53 bp, Artificial Sequence; identical to SEQ ID NO: 1275
  Description of Artificial Sequence: Synthetic casein;  5' sequence and inner sequence

SEQ ID NO: 49411 - DNA, 53 bp, Artificial Sequence; identical to SEQ ID NO: 5419
  Description of Artificial Sequence: Synthetic casein;  5' sequence and inner sequence

SEQ ID NO: 49412 - DNA, 53 bp, Artificial Sequence; identical to SEQ ID NO: 45454
  Description of Artificial Sequence: Synthetic casein;  5' sequence and inner sequence

SEQ ID NO: 49413 - DNA, 53 bp, Artificial Sequence; identical to SEQ ID NO: 45444
  Description of Artificial Sequence: Synthetic casein;  5' sequence and inner sequence

SEQ ID NO: 49414 - DNA, 53 bp, Artificial Sequence; identical to SEQ ID NO: 45886
  Description of Artificial Sequence: Synthetic casein;  5' sequence and inner sequence

SEQ ID NO: 49415 - DNA, 53 bp, Artificial Sequence; identical to SEQ ID NO: 1647
  Description of Artificial Sequence: Synthetic casein;  5' sequence and inner sequence

SEQ ID NO: 49416 - DNA, 53 bp, Artificial Sequence; identical to SEQ ID NO: 45367
  Description of Artificial Sequence: Synthetic casein;  5' sequence and inner sequence

SEQ ID NO: 49417 - DNA, 53 bp, Artificial Sequence; identical to SEQ ID NO: 45878
  Description of Artificial Sequence: Synthetic casein;  5' sequence and inner sequence

SEQ ID NO: 49418 - DNA, 53 bp, Artificial Sequence
  Description of Artificial Sequence: Synthetic casein;  5' sequence and inner sequence
tagggaagagaaggacatatgatgttgcgcacacataccgttcgtacgtcacg

SEQ ID NO: 49419 - DNA, 53 bp, Artificial Sequence; identical to SEQ ID NO: 6000
  Description of Artificial Sequence: Synthetic casein;  5' sequence and inner sequence

SEQ ID NO: 49420 - DNA, 53 bp, Artificial Sequence; identical to SEQ ID NO: 1090
  Description of Artificial Sequence: Synthetic casein;  5' sequence and inner sequence

SEQ ID NO: 49421 - DNA, 53 bp, Artificial Sequence; identical to SEQ ID NO: 29659
  Description of Artificial Sequence: Synthetic casein;  5' sequence and inner sequence

SEQ ID NO: 49422 - DNA, 53 bp, Artificial Sequence; identical to SEQ ID NO: 45370
  Description of Artificial Sequence: Synthetic casein;  5' sequence and inner sequence

SEQ ID NO: 49423 - DNA, 53 bp, Artificial Sequence; identical to SEQ ID NO: 1561
  Description of Artificial Sequence: Synthetic casein;  5' sequence and inner sequence

SEQ ID NO: 49424 - DNA, 53 bp, Artificial Sequence; identical to SEQ ID NO: 45391
  Description of Artificial Sequence: Synthetic casein;  5' sequence and inner sequence

SEQ ID NO: 49425 - DNA, 53 bp, Artificial Sequence; identical to SEQ ID NO: 45287
  Description of Artificial Sequence: Synthetic casein;  5' sequence and inner sequence

SEQ ID NO: 49426 - DNA, 53 bp, Artificial Sequence; identical to SEQ ID NO: 29914
  Description of Artificial Sequence: Synthetic casein;  5' sequence and inner sequence

SEQ ID NO: 49427 - DNA, 53 bp, Artificial Sequence; identical to SEQ ID NO: 9928
  Description of Artificial Sequence: Synthetic casein;  5' sequence and inner sequence

SEQ ID NO: 49428 - DNA, 53 bp, Artificial Sequence; identical to SEQ ID NO: 21776
  Description of Artificial Sequence: Synthetic casein;  5' sequence and inner sequence

SEQ ID NO: 49429 - DNA, 53 bp, Artificial Sequence; identical to SEQ ID NO: 1492
  Description of Artificial Sequence: Synthetic casein;  5' sequence and inner sequence

SEQ ID NO: 49430 - DNA, 53 bp, Artificial Sequence; identical to SEQ ID NO: 5933
  Description of Artificial Sequence: Synthetic casein;  5' sequence and inner sequence

SEQ ID NO: 49431 - DNA, 52 bp, Artificial Sequence
  Description of Artificial Sequence: Synthetic casein;  5' sequence and inner sequence
tagggaagagaaggacatatgatgcgtgtgacgtgcagcatgtgtcgtgaca

SEQ ID NO: 49432 - DNA, 53 bp, Artificial Sequence; identical to SEQ ID NO: 1375
  Description of Artificial Sequence: Synthetic casein;  5' sequence and inner sequence

SEQ ID NO: 49433 - DNA, 53 bp, Artificial Sequence; identical to SEQ ID NO: 45873
  Description of Artificial Sequence: Synthetic casein;  5' sequence and inner sequence

SEQ ID NO: 49434 - DNA, 53 bp, Artificial Sequence; identical to SEQ ID NO: 1742
  Description of Artificial Sequence: Synthetic casein;  5' sequence and inner sequence

SEQ ID NO: 49435 - DNA, 53 bp, Artificial Sequence
  Description of Artificial Sequence: Synthetic casein;  5' sequence and inner sequence
tagggaagagaaggacatatgatcgatacgtaggcatggcgtgtacgtgcaca

SEQ ID NO: 49436 - DNA, 53 bp, Artificial Sequence; identical to SEQ ID NO: 45859
  Description of Artificial Sequence: Synthetic casein;  5' sequence and inner sequence

SEQ ID NO: 49437 - DNA, 53 bp, Artificial Sequence; identical to SEQ ID NO: 17389
  Description of Artificial Sequence: Synthetic casein;  5' sequence and inner sequence

SEQ ID NO: 49438 - DNA, 53 bp, Artificial Sequence; identical to SEQ ID NO: 29665
  Description of Artificial Sequence: Synthetic casein;  5' sequence and inner sequence

SEQ ID NO: 49439 - DNA, 53 bp, Artificial Sequence; identical to SEQ ID NO: 45389
  Description of Artificial Sequence: Synthetic casein;  5' sequence and inner sequence

SEQ ID NO: 49440 - DNA, 53 bp, Artificial Sequence
  Description of Artificial Sequence: Synthetic casein;  5' sequence and inner sequence
tagggaagagaaggacatatgatggacgcaacgtaccgtctcgtggccatgtg

SEQ ID NO: 49441 - DNA, 53 bp, Artificial Sequence; identical to SEQ ID NO: 1061
  Description of Artificial Sequence: Synthetic casein;  5' sequence and inner sequence

SEQ ID NO: 49442 - DNA, 53 bp, Artificial Sequence; identical to SEQ ID NO: 5867
  Description of Artificial Sequence: Synthetic casein;  5' sequence and inner sequence

SEQ ID NO: 49443 - DNA, 53 bp, Artificial Sequence; identical to SEQ ID NO: 21784
  Description of Artificial Sequence: Synthetic casein;  5' sequence and inner sequence

SEQ ID NO: 49444 - DNA, 54 bp, Artificial Sequence; identical to SEQ ID NO: 1221
  Description of Artificial Sequence: Synthetic casein;  5' sequence and inner sequence

SEQ ID NO: 49445 - DNA, 53 bp, Artificial Sequence; identical to SEQ ID NO: 29306
  Description of Artificial Sequence: Synthetic casein;  5' sequence and inner sequence

SEQ ID NO: 49446 - DNA, 53 bp, Artificial Sequence
  Description of Artificial Sequence: Synthetic casein;  5' sequence and inner sequence
tagggaagagaaggacatatgatgcgtcacagcacatcgccttactcgtcacg

SEQ ID NO: 49447 - DNA, 53 bp, Artificial Sequence; identical to SEQ ID NO: 45560
  Description of Artificial Sequence: Synthetic casein;  5' sequence and inner sequence

SEQ ID NO: 49448 - DNA, 53 bp, Artificial Sequence; identical to SEQ ID NO: 5653
  Description of Artificial Sequence: Synthetic casein;  5' sequence and inner sequence

SEQ ID NO: 49449 - DNA, 53 bp, Artificial Sequence
  Description of Artificial Sequence: Synthetic casein;  5' sequence and inner sequence
tagggaagagaaggacatatgatcgtcacgcagtacgttcgcattacgtcaca

SEQ ID NO: 49450 - DNA, 53 bp, Artificial Sequence; identical to SEQ ID NO: 1661
  Description of Artificial Sequence: Synthetic casein;  5' sequence and inner sequence

SEQ ID NO: 49451 - DNA, 53 bp, Artificial Sequence; identical to SEQ ID NO: 1173
  Description of Artificial Sequence: Synthetic casein;  5' sequence and inner sequence

SEQ ID NO: 49452 - DNA, 53 bp, Artificial Sequence; identical to SEQ ID NO: 17457
  Description of Artificial Sequence: Synthetic casein;  5' sequence and inner sequence

SEQ ID NO: 49453 - DNA, 53 bp, Artificial Sequence; identical to SEQ ID NO: 1247
  Description of Artificial Sequence: Synthetic casein;  5' sequence and inner sequence

SEQ ID NO: 49454 - DNA, 53 bp, Artificial Sequence; identical to SEQ ID NO: 45565
  Description of Artificial Sequence: Synthetic casein;  5' sequence and inner sequence

SEQ ID NO: 49455 - DNA, 53 bp, Artificial Sequence
  Description of Artificial Sequence: Synthetic casein;  5' sequence and inner sequence
tagggaagagaaggacatatgatcgtaacgcgcatcgtacgtgtgacgcatcg

SEQ ID NO: 49456 - DNA, 53 bp, Artificial Sequence
  Description of Artificial Sequence: Synthetic casein;  5' sequence and inner sequence
tagggaagagaaggacatatgatgcgttacggtgcatgacgccttccgacacg

SEQ ID NO: 49457 - DNA, 53 bp, Artificial Sequence; identical to SEQ ID NO: 5543
  Description of Artificial Sequence: Synthetic casein;  5' sequence and inner sequence

SEQ ID NO: 49458 - DNA, 53 bp, Artificial Sequence
  Description of Artificial Sequence: Synthetic casein;  5' sequence and inner sequence
tagggaagagaaggacatatgatgcgatgcgcgttacgtacgacatcgacacg

SEQ ID NO: 49459 - DNA, 53 bp, Artificial Sequence; identical to SEQ ID NO: 13743
  Description of Artificial Sequence: Synthetic casein;  5' sequence and inner sequence

SEQ ID NO: 49460 - DNA, 53 bp, Artificial Sequence
  Description of Artificial Sequence: Synthetic casein;  5' sequence and inner sequence
tagggaagagaaggacatatgatgcgtgaggcaacgtagcgtacgtcgtcgca

SEQ ID NO: 49461 - DNA, 53 bp, Artificial Sequence; identical to SEQ ID NO: 17769
  Description of Artificial Sequence: Synthetic casein;  5' sequence and inner sequence

SEQ ID NO: 49462 - DNA, 53 bp, Artificial Sequence; identical to SEQ ID NO: 21496
  Description of Artificial Sequence: Synthetic casein;  5' sequence and inner sequence

SEQ ID NO: 49463 - DNA, 53 bp, Artificial Sequence; identical to SEQ ID NO: 5924
  Description of Artificial Sequence: Synthetic casein;  5' sequence and inner sequence

SEQ ID NO: 49464 - DNA, 53 bp, Artificial Sequence
  Description of Artificial Sequence: Synthetic casein;  5' sequence and inner sequence
tagggaagagaaggacatatgatgctgtggcagtacgtatgccctgcgtcacg

SEQ ID NO: 49465 - DNA, 53 bp, Artificial Sequence; identical to SEQ ID NO: 1219
  Description of Artificial Sequence: Synthetic casein;  5' sequence and inner sequence

SEQ ID NO: 49466 - DNA, 53 bp, Artificial Sequence
  Description of Artificial Sequence: Synthetic casein;  5' sequence and inner sequence
tagggaagagaaggacatatgatacgtcacacgctgcgtaacgacacgtcaca

SEQ ID NO: 49467 - DNA, 53 bp, Artificial Sequence; identical to SEQ ID NO: 6002
  Description of Artificial Sequence: Synthetic casein;  5' sequence and inner sequence

SEQ ID NO: 49468 - DNA, 53 bp, Artificial Sequence
  Description of Artificial Sequence: Synthetic casein;  5' sequence and inner sequence
tagggaagagaaggacatatgatgcactgcacgcaccctatcatggcggcatg

SEQ ID NO: 49469 - DNA, 53 bp, Artificial Sequence; identical to SEQ ID NO: 17612
  Description of Artificial Sequence: Synthetic casein;  5' sequence and inner sequence

SEQ ID NO: 49470 - DNA, 53 bp, Artificial Sequence; identical to SEQ ID NO: 29668
  Description of Artificial Sequence: Synthetic casein;  5' sequence and inner sequence

SEQ ID NO: 49471 - DNA, 53 bp, Artificial Sequence; identical to SEQ ID NO: 17718
  Description of Artificial Sequence: Synthetic casein;  5' sequence and inner sequence

SEQ ID NO: 49472 - DNA, 53 bp, Artificial Sequence; identical to SEQ ID NO: 1229
  Description of Artificial Sequence: Synthetic casein;  5' sequence and inner sequence

SEQ ID NO: 49473 - DNA, 53 bp, Artificial Sequence; identical to SEQ ID NO: 21683
  Description of Artificial Sequence: Synthetic casein;  5' sequence and inner sequence

SEQ ID NO: 49474 - DNA, 53 bp, Artificial Sequence; identical to SEQ ID NO: 1076
  Description of Artificial Sequence: Synthetic casein;  5' sequence and inner sequence

SEQ ID NO: 49475 - DNA, 53 bp, Artificial Sequence; identical to SEQ ID NO: 45425
  Description of Artificial Sequence: Synthetic casein;  5' sequence and inner sequence

SEQ ID NO: 49476 - DNA, 53 bp, Artificial Sequence; identical to SEQ ID NO: 29584
  Description of Artificial Sequence: Synthetic casein;  5' sequence and inner sequence

SEQ ID NO: 49477 - DNA, 53 bp, Artificial Sequence; identical to SEQ ID NO: 17709
  Description of Artificial Sequence: Synthetic casein;  5' sequence and inner sequence

SEQ ID NO: 49478 - DNA, 53 bp, Artificial Sequence; identical to SEQ ID NO: 45426
  Description of Artificial Sequence: Synthetic casein;  5' sequence and inner sequence

SEQ ID NO: 49479 - DNA, 53 bp, Artificial Sequence; identical to SEQ ID NO: 21880
  Description of Artificial Sequence: Synthetic casein;  5' sequence and inner sequence

SEQ ID NO: 49480 - DNA, 53 bp, Artificial Sequence
  Description of Artificial Sequence: Synthetic casein;  5' sequence and inner sequence
tagggaagagaaggacatatgatgtcacgcgatgcatggtacgttgcgacacg

SEQ ID NO: 49481 - DNA, 51 bp, Artificial Sequence; identical to SEQ ID NO: 17802
  Description of Artificial Sequence: Synthetic casein;  5' sequence and inner sequence

SEQ ID NO: 49482 - DNA, 53 bp, Artificial Sequence
  Description of Artificial Sequence: Synthetic casein;  5' sequence and inner sequence
tagggaagagaaggacatatgatgcatatcgcacagtacgtcactgcgtcacg

SEQ ID NO: 49483 - DNA, 53 bp, Artificial Sequence; identical to SEQ ID NO: 45894
  Description of Artificial Sequence: Synthetic casein;  5' sequence and inner sequence

SEQ ID NO: 49484 - DNA, 53 bp, Artificial Sequence; identical to SEQ ID NO: 17988
  Description of Artificial Sequence: Synthetic casein;  5' sequence and inner sequence

SEQ ID NO: 49485 - DNA, 53 bp, Artificial Sequence; identical to SEQ ID NO: 45651
  Description of Artificial Sequence: Synthetic casein;  5' sequence and inner sequence

SEQ ID NO: 49486 - DNA, 53 bp, Artificial Sequence
  Description of Artificial Sequence: Synthetic casein;  5' sequence and inner sequence
tagggaagagaaggacatatgatgcgtcgtaacgtcacgtccgtcgctacacg

SEQ ID NO: 49487 - DNA, 53 bp, Artificial Sequence; identical to SEQ ID NO: 1136
  Description of Artificial Sequence: Synthetic casein;  5' sequence and inner sequence

SEQ ID NO: 49488 - DNA, 53 bp, Artificial Sequence; identical to SEQ ID NO: 45627
  Description of Artificial Sequence: Synthetic casein;  5' sequence and inner sequence

SEQ ID NO: 49489 - DNA, 53 bp, Artificial Sequence; identical to SEQ ID NO: 45470
  Description of Artificial Sequence: Synthetic casein;  5' sequence and inner sequence

SEQ ID NO: 49490 - DNA, 53 bp, Artificial Sequence
  Description of Artificial Sequence: Synthetic casein;  5' sequence and inner sequence
tagggaagagaaggacatatgatgcataccgtgtgtgcgtcggtccgtacgcg

SEQ ID NO: 49491 - DNA, 53 bp, Artificial Sequence; identical to SEQ ID NO: 1507
  Description of Artificial Sequence: Synthetic casein;  5' sequence and inner sequence

SEQ ID NO: 49492 - DNA, 53 bp, Artificial Sequence; identical to SEQ ID NO: 17651
  Description of Artificial Sequence: Synthetic casein;  5' sequence and inner sequence

SEQ ID NO: 49493 - DNA, 53 bp, Artificial Sequence; identical to SEQ ID NO: 1242
  Description of Artificial Sequence: Synthetic casein;  5' sequence and inner sequence

SEQ ID NO: 49494 - DNA, 53 bp, Artificial Sequence; identical to SEQ ID NO: 21530
  Description of Artificial Sequence: Synthetic casein;  5' sequence and inner sequence

SEQ ID NO: 49495 - DNA, 53 bp, Artificial Sequence; identical to SEQ ID NO: 1277
  Description of Artificial Sequence: Synthetic casein;  5' sequence and inner sequence

SEQ ID NO: 49496 - DNA, 53 bp, Artificial Sequence; identical to SEQ ID NO: 21580
  Description of Artificial Sequence: Synthetic casein;  5' sequence and inner sequence

SEQ ID NO: 49497 - DNA, 53 bp, Artificial Sequence; identical to SEQ ID NO: 1217
  Description of Artificial Sequence: Synthetic casein;  5' sequence and inner sequence

SEQ ID NO: 49498 - DNA, 53 bp, Artificial Sequence; identical to SEQ ID NO: 5988
  Description of Artificial Sequence: Synthetic casein;  5' sequence and inner sequence

SEQ ID NO: 49499 - DNA, 53 bp, Artificial Sequence; identical to SEQ ID NO: 45853
  Description of Artificial Sequence: Synthetic casein;  5' sequence and inner sequence

SEQ ID NO: 49500 - DNA, 53 bp, Artificial Sequence; identical to SEQ ID NO: 17829
  Description of Artificial Sequence: Synthetic casein;  5' sequence and inner sequence

SEQ ID NO: 49501 - DNA, 53 bp, Artificial Sequence; identical to SEQ ID NO: 33505
  Description of Artificial Sequence: Synthetic casein;  5' sequence and inner sequence

SEQ ID NO: 49502 - DNA, 53 bp, Artificial Sequence; identical to SEQ ID NO: 29814
  Description of Artificial Sequence: Synthetic casein;  5' sequence and inner sequence

SEQ ID NO: 49503 - DNA, 53 bp, Artificial Sequence; identical to SEQ ID NO: 21903
  Description of Artificial Sequence: Synthetic casein;  5' sequence and inner sequence

SEQ ID NO: 49504 - DNA, 53 bp, Artificial Sequence
  Description of Artificial Sequence: Synthetic casein;  5' sequence and inner sequence
tagggaagagaaggacatatgatgcgatgcacgtcaacactacgtccttcacg

SEQ ID NO: 49505 - DNA, 53 bp, Artificial Sequence; identical to SEQ ID NO: 45966
  Description of Artificial Sequence: Synthetic casein;  5' sequence and inner sequence

SEQ ID NO: 49506 - DNA, 53 bp, Artificial Sequence; identical to SEQ ID NO: 17892
  Description of Artificial Sequence: Synthetic casein;  5' sequence and inner sequence

SEQ ID NO: 49507 - DNA, 53 bp, Artificial Sequence
  Description of Artificial Sequence: Synthetic casein;  5' sequence and inner sequence
tagggaagagaaggacatatgatgcgatacgcaaggacggcatgacctacgca

SEQ ID NO: 49508 - DNA, 53 bp, Artificial Sequence
  Description of Artificial Sequence: Synthetic casein;  5' sequence and inner sequence
tagggaagagaaggacatatgatgtgcgtcacgttcccatcatgtacgacacg

SEQ ID NO: 49509 - DNA, 53 bp, Artificial Sequence; identical to SEQ ID NO: 45751
  Description of Artificial Sequence: Synthetic casein;  5' sequence and inner sequence

SEQ ID NO: 49510 - DNA, 53 bp, Artificial Sequence; identical to SEQ ID NO: 29806
  Description of Artificial Sequence: Synthetic casein;  5' sequence and inner sequence

SEQ ID NO: 49511 - DNA, 53 bp, Artificial Sequence; identical to SEQ ID NO: 29984
  Description of Artificial Sequence: Synthetic casein;  5' sequence and inner sequence

SEQ ID NO: 49512 - DNA, 53 bp, Artificial Sequence; identical to SEQ ID NO: 1407
  Description of Artificial Sequence: Synthetic casein;  5' sequence and inner sequence

SEQ ID NO: 49513 - DNA, 53 bp, Artificial Sequence; identical to SEQ ID NO: 21972
  Description of Artificial Sequence: Synthetic casein;  5' sequence and inner sequence

SEQ ID NO: 49514 - DNA, 53 bp, Artificial Sequence; identical to SEQ ID NO: 5603
  Description of Artificial Sequence: Synthetic casein;  5' sequence and inner sequence

SEQ ID NO: 49515 - DNA, 53 bp, Artificial Sequence; identical to SEQ ID NO: 1398
  Description of Artificial Sequence: Synthetic casein;  5' sequence and inner sequence

SEQ ID NO: 49516 - DNA, 53 bp, Artificial Sequence; identical to SEQ ID NO: 5420
  Description of Artificial Sequence: Synthetic casein;  5' sequence and inner sequence

SEQ ID NO: 49517 - DNA, 52 bp, Artificial Sequence; identical to SEQ ID NO: 45766
  Description of Artificial Sequence: Synthetic casein;  5' sequence and inner sequence

SEQ ID NO: 49518 - DNA, 53 bp, Artificial Sequence
  Description of Artificial Sequence: Synthetic casein;  5' sequence and inner sequence
tagggaagagaaggacatatgatcgtgacgcatgtgaggcatcgtgtgtcgcg

SEQ ID NO: 49519 - DNA, 53 bp, Artificial Sequence; identical to SEQ ID NO: 45312
  Description of Artificial Sequence: Synthetic casein;  5' sequence and inner sequence

SEQ ID NO: 49520 - DNA, 53 bp, Artificial Sequence; identical to SEQ ID NO: 1317
  Description of Artificial Sequence: Synthetic casein;  5' sequence and inner sequence

SEQ ID NO: 49521 - DNA, 53 bp, Artificial Sequence
  Description of Artificial Sequence: Synthetic casein;  5' sequence and inner sequence
tagggaagagaaggacatatgatgcatgtgacgacgatgtgccgtgatgcatg

SEQ ID NO: 49522 - DNA, 53 bp, Artificial Sequence; identical to SEQ ID NO: 45752
  Description of Artificial Sequence: Synthetic casein;  5' sequence and inner sequence

SEQ ID NO: 49523 - DNA, 53 bp, Artificial Sequence; identical to SEQ ID NO: 1142
  Description of Artificial Sequence: Synthetic casein;  5' sequence and inner sequence

SEQ ID NO: 49524 - DNA, 53 bp, Artificial Sequence; identical to SEQ ID NO: 29670
  Description of Artificial Sequence: Synthetic casein;  5' sequence and inner sequence

SEQ ID NO: 49525 - DNA, 53 bp, Artificial Sequence; identical to SEQ ID NO: 29753
  Description of Artificial Sequence: Synthetic casein;  5' sequence and inner sequence

SEQ ID NO: 49526 - DNA, 53 bp, Artificial Sequence; identical to SEQ ID NO: 29741
  Description of Artificial Sequence: Synthetic casein;  5' sequence and inner sequence

SEQ ID NO: 49527 - DNA, 53 bp, Artificial Sequence; identical to SEQ ID NO: 13821
  Description of Artificial Sequence: Synthetic casein;  5' sequence and inner sequence

SEQ ID NO: 49528 - DNA, 53 bp, Artificial Sequence; identical to SEQ ID NO: 1369
  Description of Artificial Sequence: Synthetic casein;  5' sequence and inner sequence

SEQ ID NO: 49529 - DNA, 53 bp, Artificial Sequence; identical to SEQ ID NO: 21817
  Description of Artificial Sequence: Synthetic casein;  5' sequence and inner sequence

SEQ ID NO: 49530 - DNA, 53 bp, Artificial Sequence; identical to SEQ ID NO: 1032
  Description of Artificial Sequence: Synthetic casein;  5' sequence and inner sequence

SEQ ID NO: 49531 - DNA, 53 bp, Artificial Sequence
  Description of Artificial Sequence: Synthetic casein;  5' sequence and inner sequence
tagggaagagaaggacatatgatgcgtcacggtgatgcgttgtgctgttcgtg

SEQ ID NO: 49532 - DNA, 53 bp, Artificial Sequence; identical to SEQ ID NO: 1420
  Description of Artificial Sequence: Synthetic casein;  5' sequence and inner sequence

SEQ ID NO: 49533 - DNA, 53 bp, Artificial Sequence; identical to SEQ ID NO: 29980
  Description of Artificial Sequence: Synthetic casein;  5' sequence and inner sequence

SEQ ID NO: 49534 - DNA, 53 bp, Artificial Sequence; identical to SEQ ID NO: 17688
  Description of Artificial Sequence: Synthetic casein;  5' sequence and inner sequence

SEQ ID NO: 49535 - DNA, 53 bp, Artificial Sequence; identical to SEQ ID NO: 1583
  Description of Artificial Sequence: Synthetic casein;  5' sequence and inner sequence

SEQ ID NO: 49536 - DNA, 53 bp, Artificial Sequence; identical to SEQ ID NO: 29412
  Description of Artificial Sequence: Synthetic casein;  5' sequence and inner sequence

SEQ ID NO: 49537 - DNA, 53 bp, Artificial Sequence; identical to SEQ ID NO: 9953
  Description of Artificial Sequence: Synthetic casein;  5' sequence and inner sequence

SEQ ID NO: 49538 - DNA, 53 bp, Artificial Sequence; identical to SEQ ID NO: 45841
  Description of Artificial Sequence: Synthetic casein;  5' sequence and inner sequence

SEQ ID NO: 49539 - DNA, 53 bp, Artificial Sequence; identical to SEQ ID NO: 45412
  Description of Artificial Sequence: Synthetic casein;  5' sequence and inner sequence

SEQ ID NO: 49540 - DNA, 53 bp, Artificial Sequence; identical to SEQ ID NO: 5356
  Description of Artificial Sequence: Synthetic casein;  5' sequence and inner sequence

SEQ ID NO: 49541 - DNA, 53 bp, Artificial Sequence; identical to SEQ ID NO: 9938
  Description of Artificial Sequence: Synthetic casein;  5' sequence and inner sequence

SEQ ID NO: 49542 - DNA, 53 bp, Artificial Sequence; identical to SEQ ID NO: 45781
  Description of Artificial Sequence: Synthetic casein;  5' sequence and inner sequence

SEQ ID NO: 49543 - DNA, 53 bp, Artificial Sequence; identical to SEQ ID NO: 1223
  Description of Artificial Sequence: Synthetic casein;  5' sequence and inner sequence

SEQ ID NO: 49544 - DNA, 53 bp, Artificial Sequence; identical to SEQ ID NO: 45838
  Description of Artificial Sequence: Synthetic casein;  5' sequence and inner sequence

SEQ ID NO: 49545 - DNA, 51 bp, Artificial Sequence; identical to SEQ ID NO: 1148
  Description of Artificial Sequence: Synthetic casein;  5' sequence and inner sequence

SEQ ID NO: 49546 - DNA, 53 bp, Artificial Sequence; identical to SEQ ID NO: 21960
  Description of Artificial Sequence: Synthetic casein;  5' sequence and inner sequence

SEQ ID NO: 49547 - DNA, 53 bp, Artificial Sequence; identical to SEQ ID NO: 45597
  Description of Artificial Sequence: Synthetic casein;  5' sequence and inner sequence

SEQ ID NO: 49548 - DNA, 53 bp, Artificial Sequence; identical to SEQ ID NO: 21426
  Description of Artificial Sequence: Synthetic casein;  5' sequence and inner sequence

SEQ ID NO: 49549 - DNA, 53 bp, Artificial Sequence; identical to SEQ ID NO: 1072
  Description of Artificial Sequence: Synthetic casein;  5' sequence and inner sequence

SEQ ID NO: 49550 - DNA, 53 bp, Artificial Sequence; identical to SEQ ID NO: 5748
  Description of Artificial Sequence: Synthetic casein;  5' sequence and inner sequence

SEQ ID NO: 49551 - DNA, 53 bp, Artificial Sequence; identical to SEQ ID NO: 1805
  Description of Artificial Sequence: Synthetic casein;  5' sequence and inner sequence

SEQ ID NO: 49552 - DNA, 53 bp, Artificial Sequence; identical to SEQ ID NO: 45595
  Description of Artificial Sequence: Synthetic casein;  5' sequence and inner sequence

SEQ ID NO: 49553 - DNA, 53 bp, Artificial Sequence; identical to SEQ ID NO: 45422
  Description of Artificial Sequence: Synthetic casein;  5' sequence and inner sequence

SEQ ID NO: 49554 - DNA, 53 bp, Artificial Sequence; identical to SEQ ID NO: 45527
  Description of Artificial Sequence: Synthetic casein;  5' sequence and inner sequence

SEQ ID NO: 49555 - DNA, 53 bp, Artificial Sequence; identical to SEQ ID NO: 18001
  Description of Artificial Sequence: Synthetic casein;  5' sequence and inner sequence

SEQ ID NO: 49556 - DNA, 53 bp, Artificial Sequence; identical to SEQ ID NO: 1110
  Description of Artificial Sequence: Synthetic casein;  5' sequence and inner sequence

SEQ ID NO: 49557 - DNA, 53 bp, Artificial Sequence
  Description of Artificial Sequence: Synthetic casein;  5' sequence and inner sequence
tagggaagagaaggacatatgatgcgacatcgtagcatggtccttgctgcacg

SEQ ID NO: 49558 - DNA, 53 bp, Artificial Sequence; identical to SEQ ID NO: 5890
  Description of Artificial Sequence: Synthetic casein;  5' sequence and inner sequence

SEQ ID NO: 49559 - DNA, 53 bp, Artificial Sequence; identical to SEQ ID NO: 45910
  Description of Artificial Sequence: Synthetic casein;  5' sequence and inner sequence

SEQ ID NO: 49560 - DNA, 53 bp, Artificial Sequence; identical to SEQ ID NO: 45704
  Description of Artificial Sequence: Synthetic casein;  5' sequence and inner sequence

SEQ ID NO: 49561 - DNA, 52 bp, Artificial Sequence
  Description of Artificial Sequence: Synthetic casein;  5' sequence and inner sequence
tagggaagagaaggacatatgatggacgcagcgaaccgtacgtggacgtgca

SEQ ID NO: 49562 - DNA, 53 bp, Artificial Sequence; identical to SEQ ID NO: 1205
  Description of Artificial Sequence: Synthetic casein;  5' sequence and inner sequence

SEQ ID NO: 49563 - DNA, 53 bp, Artificial Sequence; identical to SEQ ID NO: 21596
  Description of Artificial Sequence: Synthetic casein;  5' sequence and inner sequence

SEQ ID NO: 49564 - DNA, 53 bp, Artificial Sequence; identical to SEQ ID NO: 1086
  Description of Artificial Sequence: Synthetic casein;  5' sequence and inner sequence

SEQ ID NO: 49565 - DNA, 53 bp, Artificial Sequence
  Description of Artificial Sequence: Synthetic casein;  5' sequence and inner sequence
tagggaagagaaggacatatgatgcatgtcgtgcgatgtcgttgtgctgcacg

SEQ ID NO: 49566 - DNA, 53 bp, Artificial Sequence; identical to SEQ ID NO: 1678
  Description of Artificial Sequence: Synthetic casein;  5' sequence and inner sequence

SEQ ID NO: 49567 - DNA, 51 bp, Artificial Sequence
  Description of Artificial Sequence: Synthetic casein;  5' sequence and inner sequence
tagggaagagaaggacatatgatggccgcaacgtaccgtatcgtggccatg

SEQ ID NO: 49568 - DNA, 53 bp, Artificial Sequence
  Description of Artificial Sequence: Synthetic casein;  5' sequence and inner sequence
tagggaagagaaggacatatgatcgtacgcaagggcacggtacgtacgacacg

SEQ ID NO: 49569 - DNA, 53 bp, Artificial Sequence; identical to SEQ ID NO: 17748
  Description of Artificial Sequence: Synthetic casein;  5' sequence and inner sequence

SEQ ID NO: 49570 - DNA, 53 bp, Artificial Sequence; identical to SEQ ID NO: 5987
  Description of Artificial Sequence: Synthetic casein;  5' sequence and inner sequence

SEQ ID NO: 49571 - DNA, 53 bp, Artificial Sequence
  Description of Artificial Sequence: Synthetic casein;  5' sequence and inner sequence
tagggaagagaaggacatatgatggcattcgatgaacgaggcatgatgcgtca

SEQ ID NO: 49572 - DNA, 53 bp, Artificial Sequence; identical to SEQ ID NO: 5802
  Description of Artificial Sequence: Synthetic casein;  5' sequence and inner sequence

SEQ ID NO: 49573 - DNA, 53 bp, Artificial Sequence; identical to SEQ ID NO: 29563
  Description of Artificial Sequence: Synthetic casein;  5' sequence and inner sequence

SEQ ID NO: 49574 - DNA, 53 bp, Artificial Sequence; identical to SEQ ID NO: 1034
  Description of Artificial Sequence: Synthetic casein;  5' sequence and inner sequence

SEQ ID NO: 49575 - DNA, 53 bp, Artificial Sequence; identical to SEQ ID NO: 1521
  Description of Artificial Sequence: Synthetic casein;  5' sequence and inner sequence

SEQ ID NO: 49576 - DNA, 53 bp, Artificial Sequence; identical to SEQ ID NO: 29979
  Description of Artificial Sequence: Synthetic casein;  5' sequence and inner sequence

SEQ ID NO: 49577 - DNA, 53 bp, Artificial Sequence; identical to SEQ ID NO: 1551
  Description of Artificial Sequence: Synthetic casein;  5' sequence and inner sequence

SEQ ID NO: 49578 - DNA, 53 bp, Artificial Sequence; identical to SEQ ID NO: 45674
  Description of Artificial Sequence: Synthetic casein;  5' sequence and inner sequence

SEQ ID NO: 49579 - DNA, 53 bp, Artificial Sequence; identical to SEQ ID NO: 45972
  Description of Artificial Sequence: Synthetic casein;  5' sequence and inner sequence

SEQ ID NO: 49580 - DNA, 53 bp, Artificial Sequence; identical to SEQ ID NO: 37797
  Description of Artificial Sequence: Synthetic casein;  5' sequence and inner sequence

SEQ ID NO: 49581 - DNA, 53 bp, Artificial Sequence; identical to SEQ ID NO: 45555
  Description of Artificial Sequence: Synthetic casein;  5' sequence and inner sequence

SEQ ID NO: 49582 - DNA, 53 bp, Artificial Sequence; identical to SEQ ID NO: 45596
  Description of Artificial Sequence: Synthetic casein;  5' sequence and inner sequence

SEQ ID NO: 49583 - DNA, 53 bp, Artificial Sequence; identical to SEQ ID NO: 5882
  Description of Artificial Sequence: Synthetic casein;  5' sequence and inner sequence

SEQ ID NO: 49584 - DNA, 53 bp, Artificial Sequence; identical to SEQ ID NO: 13958
  Description of Artificial Sequence: Synthetic casein;  5' sequence and inner sequence

SEQ ID NO: 49585 - DNA, 53 bp, Artificial Sequence; identical to SEQ ID NO: 1065
  Description of Artificial Sequence: Synthetic casein;  5' sequence and inner sequence

SEQ ID NO: 49586 - DNA, 53 bp, Artificial Sequence; identical to SEQ ID NO: 45549
  Description of Artificial Sequence: Synthetic casein;  5' sequence and inner sequence

SEQ ID NO: 49587 - DNA, 53 bp, Artificial Sequence
  Description of Artificial Sequence: Synthetic casein;  5' sequence and inner sequence
tagggaagagaaggacatatgatgcatcgcatgcgtcacgtcctcaccgtgcc

SEQ ID NO: 49588 - DNA, 53 bp, Artificial Sequence; identical to SEQ ID NO: 1057
  Description of Artificial Sequence: Synthetic casein;  5' sequence and inner sequence

SEQ ID NO: 49589 - DNA, 53 bp, Artificial Sequence; identical to SEQ ID NO: 45843
  Description of Artificial Sequence: Synthetic casein;  5' sequence and inner sequence

SEQ ID NO: 49590 - DNA, 53 bp, Artificial Sequence; identical to SEQ ID NO: 45662
  Description of Artificial Sequence: Synthetic casein;  5' sequence and inner sequence

SEQ ID NO: 49591 - DNA, 53 bp, Artificial Sequence; identical to SEQ ID NO: 29705
  Description of Artificial Sequence: Synthetic casein;  5' sequence and inner sequence

SEQ ID NO: 49592 - DNA, 53 bp, Artificial Sequence; identical to SEQ ID NO: 5272
  Description of Artificial Sequence: Synthetic casein;  5' sequence and inner sequence

SEQ ID NO: 49593 - DNA, 53 bp, Artificial Sequence
  Description of Artificial Sequence: Synthetic casein;  5' sequence and inner sequence
tagggaagagaaggacatatgatgcgtacacgtcacacgcatgccacgtcacg

SEQ ID NO: 49594 - DNA, 53 bp, Artificial Sequence; identical to SEQ ID NO: 21666
  Description of Artificial Sequence: Synthetic casein;  5' sequence and inner sequence

SEQ ID NO: 49595 - DNA, 53 bp, Artificial Sequence; identical to SEQ ID NO: 45939
  Description of Artificial Sequence: Synthetic casein;  5' sequence and inner sequence

SEQ ID NO: 49596 - DNA, 53 bp, Artificial Sequence
  Description of Artificial Sequence: Synthetic casein;  5' sequence and inner sequence
tagggaagagaaggacatatgatgcgtgatggcgtaacgtccgacactgcaca

SEQ ID NO: 49597 - DNA, 53 bp, Artificial Sequence
  Description of Artificial Sequence: Synthetic casein;  5' sequence and inner sequence
tagggaagagaaggacatatgatgcgtacggcacgacgatgatgcactacgtg

SEQ ID NO: 49598 - DNA, 53 bp, Artificial Sequence; identical to SEQ ID NO: 1331
  Description of Artificial Sequence: Synthetic casein;  5' sequence and inner sequence

SEQ ID NO: 49599 - DNA, 53 bp, Artificial Sequence; identical to SEQ ID NO: 45620
  Description of Artificial Sequence: Synthetic casein;  5' sequence and inner sequence

SEQ ID NO: 49600 - DNA, 53 bp, Artificial Sequence; identical to SEQ ID NO: 13892
  Description of Artificial Sequence: Synthetic casein;  5' sequence and inner sequence

SEQ ID NO: 49601 - DNA, 53 bp, Artificial Sequence; identical to SEQ ID NO: 21661
  Description of Artificial Sequence: Synthetic casein;  5' sequence and inner sequence

SEQ ID NO: 49602 - DNA, 53 bp, Artificial Sequence; identical to SEQ ID NO: 1452
  Description of Artificial Sequence: Synthetic casein;  5' sequence and inner sequence

SEQ ID NO: 49603 - DNA, 53 bp, Artificial Sequence; identical to SEQ ID NO: 1406
  Description of Artificial Sequence: Synthetic casein;  5' sequence and inner sequence

SEQ ID NO: 49604 - DNA, 48 bp, Artificial Sequence; identical to SEQ ID NO: 21136
  Description of Artificial Sequence: Synthetic casein;  5' sequence and inner sequence

SEQ ID NO: 49605 - DNA, 53 bp, Artificial Sequence; identical to SEQ ID NO: 45552
  Description of Artificial Sequence: Synthetic casein;  5' sequence and inner sequence

SEQ ID NO: 49606 - DNA, 53 bp, Artificial Sequence; identical to SEQ ID NO: 45668
  Description of Artificial Sequence: Synthetic casein;  5' sequence and inner sequence

SEQ ID NO: 49607 - DNA, 53 bp, Artificial Sequence; identical to SEQ ID NO: 29737
  Description of Artificial Sequence: Synthetic casein;  5' sequence and inner sequence

SEQ ID NO: 49608 - DNA, 53 bp, Artificial Sequence
  Description of Artificial Sequence: Synthetic casein;  5' sequence and inner sequence
tagggaagagaaggacatatgatcaacgcaacgcatggtgacgtattgccgtg

SEQ ID NO: 49609 - DNA, 53 bp, Artificial Sequence; identical to SEQ ID NO: 33193
  Description of Artificial Sequence: Synthetic casein;  5' sequence and inner sequence

SEQ ID NO: 49610 - DNA, 53 bp, Artificial Sequence; identical to SEQ ID NO: 17605
  Description of Artificial Sequence: Synthetic casein;  5' sequence and inner sequence

SEQ ID NO: 49611 - DNA, 53 bp, Artificial Sequence; identical to SEQ ID NO: 45768
  Description of Artificial Sequence: Synthetic casein;  5' sequence and inner sequence

SEQ ID NO: 49612 - DNA, 53 bp, Artificial Sequence
  Description of Artificial Sequence: Synthetic casein;  5' sequence and inner sequence
tagggaagagaaggacatatgatgtcatgcacgcaccctatcatgtaggcatg

SEQ ID NO: 49613 - DNA, 53 bp, Artificial Sequence
  Description of Artificial Sequence: Synthetic casein;  5' sequence and inner sequence
tagggaagagaaggacatatgatcgaacgcacactgcacgccactacgtcacg

SEQ ID NO: 49614 - DNA, 53 bp, Artificial Sequence; identical to SEQ ID NO: 1477
  Description of Artificial Sequence: Synthetic casein;  5' sequence and inner sequence

SEQ ID NO: 49615 - DNA, 53 bp, Artificial Sequence; identical to SEQ ID NO: 45711
  Description of Artificial Sequence: Synthetic casein;  5' sequence and inner sequence

SEQ ID NO: 49616 - DNA, 51 bp, Artificial Sequence
  Description of Artificial Sequence: Synthetic casein;  5' sequence and inner sequence
tagggaagagaaggacatatgatggacgcaacgcaccgtatcgtggccatg

SEQ ID NO: 49617 - DNA, 53 bp, Artificial Sequence; identical to SEQ ID NO: 21515
  Description of Artificial Sequence: Synthetic casein;  5' sequence and inner sequence

SEQ ID NO: 49618 - DNA, 53 bp, Artificial Sequence; identical to SEQ ID NO: 29791
  Description of Artificial Sequence: Synthetic casein;  5' sequence and inner sequence

SEQ ID NO: 49619 - DNA, 53 bp, Artificial Sequence; identical to SEQ ID NO: 21286
  Description of Artificial Sequence: Synthetic casein;  5' sequence and inner sequence

SEQ ID NO: 49620 - DNA, 53 bp, Artificial Sequence; identical to SEQ ID NO: 1132
  Description of Artificial Sequence: Synthetic casein;  5' sequence and inner sequence

SEQ ID NO: 49621 - DNA, 53 bp, Artificial Sequence; identical to SEQ ID NO: 21982
  Description of Artificial Sequence: Synthetic casein;  5' sequence and inner sequence

SEQ ID NO: 49622 - DNA, 53 bp, Artificial Sequence
  Description of Artificial Sequence: Synthetic casein;  5' sequence and inner sequence
tagggaagagaaggacatatgatcgtaccgcaggcatacgtgacgtcaacgca

SEQ ID NO: 49623 - DNA, 53 bp, Artificial Sequence; identical to SEQ ID NO: 9798
  Description of Artificial Sequence: Synthetic casein;  5' sequence and inner sequence

SEQ ID NO: 49624 - DNA, 53 bp, Artificial Sequence; identical to SEQ ID NO: 21793
  Description of Artificial Sequence: Synthetic casein;  5' sequence and inner sequence

SEQ ID NO: 49625 - DNA, 53 bp, Artificial Sequence; identical to SEQ ID NO: 1324
  Description of Artificial Sequence: Synthetic casein;  5' sequence and inner sequence

SEQ ID NO: 49626 - DNA, 53 bp, Artificial Sequence; identical to SEQ ID NO: 45903
  Description of Artificial Sequence: Synthetic casein;  5' sequence and inner sequence

SEQ ID NO: 49627 - DNA, 53 bp, Artificial Sequence; identical to SEQ ID NO: 21576
  Description of Artificial Sequence: Synthetic casein;  5' sequence and inner sequence

SEQ ID NO: 49628 - DNA, 53 bp, Artificial Sequence; identical to SEQ ID NO: 45249
  Description of Artificial Sequence: Synthetic casein;  5' sequence and inner sequence

SEQ ID NO: 49629 - DNA, 53 bp, Artificial Sequence; identical to SEQ ID NO: 17744
  Description of Artificial Sequence: Synthetic casein;  5' sequence and inner sequence

SEQ ID NO: 49630 - DNA, 53 bp, Artificial Sequence
  Description of Artificial Sequence: Synthetic casein;  5' sequence and inner sequence
tagggaagagaaggacatatgatgtcgcgatgaccgtcagtacgcacgtcagc

SEQ ID NO: 49631 - DNA, 53 bp, Artificial Sequence; identical to SEQ ID NO: 1171
  Description of Artificial Sequence: Synthetic casein;  5' sequence and inner sequence

SEQ ID NO: 49632 - DNA, 53 bp, Artificial Sequence; identical to SEQ ID NO: 29307
  Description of Artificial Sequence: Synthetic casein;  5' sequence and inner sequence

SEQ ID NO: 49633 - DNA, 53 bp, Artificial Sequence; identical to SEQ ID NO: 29844
  Description of Artificial Sequence: Synthetic casein;  5' sequence and inner sequence

SEQ ID NO: 49634 - DNA, 53 bp, Artificial Sequence; identical to SEQ ID NO: 13985
  Description of Artificial Sequence: Synthetic casein;  5' sequence and inner sequence

SEQ ID NO: 49635 - DNA, 53 bp, Artificial Sequence; identical to SEQ ID NO: 29704
  Description of Artificial Sequence: Synthetic casein;  5' sequence and inner sequence

SEQ ID NO: 49636 - DNA, 53 bp, Artificial Sequence; identical to SEQ ID NO: 13922
  Description of Artificial Sequence: Synthetic casein;  5' sequence and inner sequence

SEQ ID NO: 49637 - DNA, 53 bp, Artificial Sequence; identical to SEQ ID NO: 6001
  Description of Artificial Sequence: Synthetic casein;  5' sequence and inner sequence

SEQ ID NO: 49638 - DNA, 53 bp, Artificial Sequence; identical to SEQ ID NO: 21692
  Description of Artificial Sequence: Synthetic casein;  5' sequence and inner sequence

SEQ ID NO: 49639 - DNA, 53 bp, Artificial Sequence; identical to SEQ ID NO: 21797
  Description of Artificial Sequence: Synthetic casein;  5' sequence and inner sequence

SEQ ID NO: 49640 - DNA, 53 bp, Artificial Sequence; identical to SEQ ID NO: 1697
  Description of Artificial Sequence: Synthetic casein;  5' sequence and inner sequence

SEQ ID NO: 49641 - DNA, 55 bp, Artificial Sequence
  Description of Artificial Sequence: Synthetic casein;  5' sequence and inner sequence
tagggaagagaaggacatatgatgcacgactcgcaccctatcatgaggccatgtg

SEQ ID NO: 49642 - DNA, 53 bp, Artificial Sequence; identical to SEQ ID NO: 5469
  Description of Artificial Sequence: Synthetic casein;  5' sequence and inner sequence

SEQ ID NO: 49643 - DNA, 53 bp, Artificial Sequence; identical to SEQ ID NO: 45602
  Description of Artificial Sequence: Synthetic casein;  5' sequence and inner sequence

SEQ ID NO: 49644 - DNA, 53 bp, Artificial Sequence; identical to SEQ ID NO: 5694
  Description of Artificial Sequence: Synthetic casein;  5' sequence and inner sequence

SEQ ID NO: 49645 - DNA, 51 bp, Artificial Sequence
  Description of Artificial Sequence: Synthetic casein;  5' sequence and inner sequence
tagggaagagaaggacatatgatgtacgcaacgtaccgtatcgtggccatg

SEQ ID NO: 49646 - DNA, 53 bp, Artificial Sequence; identical to SEQ ID NO: 45991
  Description of Artificial Sequence: Synthetic casein;  5' sequence and inner sequence

SEQ ID NO: 49647 - DNA, 53 bp, Artificial Sequence; identical to SEQ ID NO: 21307
  Description of Artificial Sequence: Synthetic casein;  5' sequence and inner sequence

SEQ ID NO: 49648 - DNA, 53 bp, Artificial Sequence; identical to SEQ ID NO: 45937
  Description of Artificial Sequence: Synthetic casein;  5' sequence and inner sequence

SEQ ID NO: 49649 - DNA, 53 bp, Artificial Sequence
  Description of Artificial Sequence: Synthetic casein;  5' sequence and inner sequence
tagggaagagaaggacatatgatcggtgtgacggcatcgtgacgtactgcgca

SEQ ID NO: 49650 - DNA, 52 bp, Artificial Sequence; identical to SEQ ID NO: 1975
  Description of Artificial Sequence: Synthetic casein;  5' sequence and inner sequence

SEQ ID NO: 49651 - DNA, 53 bp, Artificial Sequence; identical to SEQ ID NO: 45924
  Description of Artificial Sequence: Synthetic casein;  5' sequence and inner sequence

SEQ ID NO: 49652 - DNA, 53 bp, Artificial Sequence; identical to SEQ ID NO: 21773
  Description of Artificial Sequence: Synthetic casein;  5' sequence and inner sequence

SEQ ID NO: 49653 - DNA, 53 bp, Artificial Sequence; identical to SEQ ID NO: 1100
  Description of Artificial Sequence: Synthetic casein;  5' sequence and inner sequence

SEQ ID NO: 49654 - DNA, 53 bp, Artificial Sequence; identical to SEQ ID NO: 21372
  Description of Artificial Sequence: Synthetic casein;  5' sequence and inner sequence

SEQ ID NO: 49655 - DNA, 53 bp, Artificial Sequence; identical to SEQ ID NO: 30000
  Description of Artificial Sequence: Synthetic casein;  5' sequence and inner sequence

SEQ ID NO: 49656 - DNA, 53 bp, Artificial Sequence
  Description of Artificial Sequence: Synthetic casein;  5' sequence and inner sequence
tagggaagagaaggacatatgatgcgatgggacgttacgtacggtacgccaca

SEQ ID NO: 49657 - DNA, 53 bp, Artificial Sequence; identical to SEQ ID NO: 17950
  Description of Artificial Sequence: Synthetic casein;  5' sequence and inner sequence

SEQ ID NO: 49658 - DNA, 53 bp, Artificial Sequence; identical to SEQ ID NO: 33190
  Description of Artificial Sequence: Synthetic casein;  5' sequence and inner sequence

SEQ ID NO: 49659 - DNA, 53 bp, Artificial Sequence; identical to SEQ ID NO: 29846
  Description of Artificial Sequence: Synthetic casein;  5' sequence and inner sequence

SEQ ID NO: 49660 - DNA, 51 bp, Artificial Sequence
  Description of Artificial Sequence: Synthetic casein;  5' sequence and inner sequence
tagggaagagaaggacatatgatggacgcaacgtgtgcaatgttgtacgca

SEQ ID NO: 49661 - DNA, 53 bp, Artificial Sequence; identical to SEQ ID NO: 1096
  Description of Artificial Sequence: Synthetic casein;  5' sequence and inner sequence

SEQ ID NO: 49662 - DNA, 53 bp, Artificial Sequence
  Description of Artificial Sequence: Synthetic casein;  5' sequence and inner sequence
tagggaagagaaggacatatgatgacgacaacgtaccgccatgttacgtcacg

SEQ ID NO: 49663 - DNA, 53 bp, Artificial Sequence; identical to SEQ ID NO: 45544
  Description of Artificial Sequence: Synthetic casein;  5' sequence and inner sequence

SEQ ID NO: 49664 - DNA, 53 bp, Artificial Sequence; identical to SEQ ID NO: 45499
  Description of Artificial Sequence: Synthetic casein;  5' sequence and inner sequence

SEQ ID NO: 49665 - DNA, 53 bp, Artificial Sequence
  Description of Artificial Sequence: Synthetic casein;  5' sequence and inner sequence
tagggaagagaaggacatatgatggacgcaacgcaacgatacgtgcttacgtg

SEQ ID NO: 49666 - DNA, 53 bp, Artificial Sequence; identical to SEQ ID NO: 1332
  Description of Artificial Sequence: Synthetic casein;  5' sequence and inner sequence

SEQ ID NO: 49667 - DNA, 52 bp, Artificial Sequence; identical to SEQ ID NO: 5559
  Description of Artificial Sequence: Synthetic casein;  5' sequence and inner sequence

SEQ ID NO: 49668 - DNA, 53 bp, Artificial Sequence; identical to SEQ ID NO: 21668
  Description of Artificial Sequence: Synthetic casein;  5' sequence and inner sequence

SEQ ID NO: 49669 - DNA, 53 bp, Artificial Sequence; identical to SEQ ID NO: 45917
  Description of Artificial Sequence: Synthetic casein;  5' sequence and inner sequence

SEQ ID NO: 49670 - DNA, 53 bp, Artificial Sequence; identical to SEQ ID NO: 9868
  Description of Artificial Sequence: Synthetic casein;  5' sequence and inner sequence

SEQ ID NO: 49671 - DNA, 53 bp, Artificial Sequence; identical to SEQ ID NO: 45926
  Description of Artificial Sequence: Synthetic casein;  5' sequence and inner sequence

SEQ ID NO: 49672 - DNA, 53 bp, Artificial Sequence; identical to SEQ ID NO: 45379
  Description of Artificial Sequence: Synthetic casein;  5' sequence and inner sequence

SEQ ID NO: 49673 - DNA, 53 bp, Artificial Sequence; identical to SEQ ID NO: 33074
  Description of Artificial Sequence: Synthetic casein;  5' sequence and inner sequence

SEQ ID NO: 49674 - DNA, 53 bp, Artificial Sequence; identical to SEQ ID NO: 45556
  Description of Artificial Sequence: Synthetic casein;  5' sequence and inner sequence

SEQ ID NO: 49675 - DNA, 53 bp, Artificial Sequence; identical to SEQ ID NO: 1603
  Description of Artificial Sequence: Synthetic casein;  5' sequence and inner sequence

SEQ ID NO: 49676 - DNA, 53 bp, Artificial Sequence
  Description of Artificial Sequence: Synthetic casein;  5' sequence and inner sequence
tagggaagagaaggacatatgatgcgtaacggtacgtatccctgtcgtacgca

SEQ ID NO: 49677 - DNA, 53 bp, Artificial Sequence
  Description of Artificial Sequence: Synthetic casein;  5' sequence and inner sequence
tagggaagagaaggacatatgatgcgtacacgtgcatcgtcttcgcgcacacg

SEQ ID NO: 49678 - DNA, 53 bp, Artificial Sequence; identical to SEQ ID NO: 45849
  Description of Artificial Sequence: Synthetic casein;  5' sequence and inner sequence

SEQ ID NO: 49679 - DNA, 53 bp, Artificial Sequence; identical to SEQ ID NO: 45935
  Description of Artificial Sequence: Synthetic casein;  5' sequence and inner sequence

SEQ ID NO: 49680 - DNA, 53 bp, Artificial Sequence; identical to SEQ ID NO: 1048
  Description of Artificial Sequence: Synthetic casein;  5' sequence and inner sequence

SEQ ID NO: 49681 - DNA, 53 bp, Artificial Sequence
  Description of Artificial Sequence: Synthetic casein;  5' sequence and inner sequence
tagggaagagaaggacatatgatcgcgtcagcacgtgatggtacgtacgcaca

SEQ ID NO: 49682 - DNA, 53 bp, Artificial Sequence; identical to SEQ ID NO: 17799
  Description of Artificial Sequence: Synthetic casein;  5' sequence and inner sequence

SEQ ID NO: 49683 - DNA, 53 bp, Artificial Sequence
  Description of Artificial Sequence: Synthetic casein;  5' sequence and inner sequence
tagggaagagaaggacatatgatcgtgtccacgcaacatgtgtacgttacgca

SEQ ID NO: 49684 - DNA, 53 bp, Artificial Sequence
  Description of Artificial Sequence: Synthetic casein;  5' sequence and inner sequence
tagggaagagaaggacatatgatggacgcaacgtaccgtatcttggccatgtg

SEQ ID NO: 49685 - DNA, 53 bp, Artificial Sequence; identical to SEQ ID NO: 29672
  Description of Artificial Sequence: Synthetic casein;  5' sequence and inner sequence

SEQ ID NO: 49686 - DNA, 53 bp, Artificial Sequence
  Description of Artificial Sequence: Synthetic casein;  5' sequence and inner sequence
tagggaagagaaggacatatgatgcactgtgtgtcgtaccgtcctgctgcacg

SEQ ID NO: 49687 - DNA, 53 bp, Artificial Sequence
  Description of Artificial Sequence: Synthetic casein;  5' sequence and inner sequence
tagggaagagaaggacatatgatgacgtgacgcataccgtatgtacgttgtgc

SEQ ID NO: 49688 - DNA, 53 bp, Artificial Sequence; identical to SEQ ID NO: 29818
  Description of Artificial Sequence: Synthetic casein;  5' sequence and inner sequence

SEQ ID NO: 49689 - DNA, 53 bp, Artificial Sequence; identical to SEQ ID NO: 1486
  Description of Artificial Sequence: Synthetic casein;  5' sequence and inner sequence

SEQ ID NO: 49690 - DNA, 53 bp, Artificial Sequence; identical to SEQ ID NO: 45947
  Description of Artificial Sequence: Synthetic casein;  5' sequence and inner sequence

SEQ ID NO: 49691 - DNA, 53 bp, Artificial Sequence
  Description of Artificial Sequence: Synthetic casein;  5' sequence and inner sequence
tagggaagagaaggacatatgatgacgtgccagcgtgacgtatggcatgcatc

SEQ ID NO: 49692 - DNA, 53 bp, Artificial Sequence; identical to SEQ ID NO: 45677
  Description of Artificial Sequence: Synthetic casein;  5' sequence and inner sequence

SEQ ID NO: 49693 - DNA, 53 bp, Artificial Sequence
  Description of Artificial Sequence: Synthetic casein;  5' sequence and inner sequence
tagggaagagaaggacatatgatggacgcaacgtaccgtatcgtggtcacgta

SEQ ID NO: 49694 - DNA, 53 bp, Artificial Sequence; identical to SEQ ID NO: 45898
  Description of Artificial Sequence: Synthetic casein;  5' sequence and inner sequence

SEQ ID NO: 49695 - DNA, 53 bp, Artificial Sequence
  Description of Artificial Sequence: Synthetic casein;  5' sequence and inner sequence
tagggaagagaaggacatatgatacgtcatgacgtactgcgcatcacgacacg

SEQ ID NO: 49696 - DNA, 53 bp, Artificial Sequence
  Description of Artificial Sequence: Synthetic casein;  5' sequence and inner sequence
tagggaagagaaggacatatgatgcacgactcgcaccctatcatgtcggcatg

SEQ ID NO: 49697 - DNA, 53 bp, Artificial Sequence; identical to SEQ ID NO: 1788
  Description of Artificial Sequence: Synthetic casein;  5' sequence and inner sequence

SEQ ID NO: 49698 - DNA, 53 bp, Artificial Sequence
  Description of Artificial Sequence: Synthetic casein;  5' sequence and inner sequence
tagggaagagaaggacatatgatggacgcaaagtaccgtatcgtggccatgtg

SEQ ID NO: 49699 - DNA, 53 bp, Artificial Sequence; identical to SEQ ID NO: 1294
  Description of Artificial Sequence: Synthetic casein;  5' sequence and inner sequence

SEQ ID NO: 49700 - DNA, 53 bp, Artificial Sequence; identical to SEQ ID NO: 29677
  Description of Artificial Sequence: Synthetic casein;  5' sequence and inner sequence

SEQ ID NO: 49701 - DNA, 53 bp, Artificial Sequence; identical to SEQ ID NO: 45726
  Description of Artificial Sequence: Synthetic casein;  5' sequence and inner sequence

SEQ ID NO: 49702 - DNA, 53 bp, Artificial Sequence; identical to SEQ ID NO: 45610
  Description of Artificial Sequence: Synthetic casein;  5' sequence and inner sequence

SEQ ID NO: 49703 - DNA, 53 bp, Artificial Sequence; identical to SEQ ID NO: 1543
  Description of Artificial Sequence: Synthetic casein;  5' sequence and inner sequence

SEQ ID NO: 49704 - DNA, 52 bp, Artificial Sequence; identical to SEQ ID NO: 5763
  Description of Artificial Sequence: Synthetic casein;  5' sequence and inner sequence

SEQ ID NO: 49705 - DNA, 53 bp, Artificial Sequence; identical to SEQ ID NO: 21367
  Description of Artificial Sequence: Synthetic casein;  5' sequence and inner sequence

SEQ ID NO: 49706 - DNA, 53 bp, Artificial Sequence
  Description of Artificial Sequence: Synthetic casein;  5' sequence and inner sequence
tagggaagagaaggacatatgatggacgcaacggaccgtatcgtggccatgtg

SEQ ID NO: 49707 - DNA, 53 bp, Artificial Sequence; identical to SEQ ID NO: 45636
  Description of Artificial Sequence: Synthetic casein;  5' sequence and inner sequence

SEQ ID NO: 49708 - DNA, 53 bp, Artificial Sequence; identical to SEQ ID NO: 13767
  Description of Artificial Sequence: Synthetic casein;  5' sequence and inner sequence

SEQ ID NO: 49709 - DNA, 53 bp, Artificial Sequence
  Description of Artificial Sequence: Synthetic casein;  5' sequence and inner sequence
tagggaagagaaggacatatgatgcaacgccacgtacacgtccttgcctcacg

SEQ ID NO: 49710 - DNA, 53 bp, Artificial Sequence; identical to SEQ ID NO: 45745
  Description of Artificial Sequence: Synthetic casein;  5' sequence and inner sequence

SEQ ID NO: 49711 - DNA, 53 bp, Artificial Sequence; identical to SEQ ID NO: 21923
  Description of Artificial Sequence: Synthetic casein;  5' sequence and inner sequence

SEQ ID NO: 49712 - DNA, 53 bp, Artificial Sequence; identical to SEQ ID NO: 1285
  Description of Artificial Sequence: Synthetic casein;  5' sequence and inner sequence

SEQ ID NO: 49713 - DNA, 53 bp, Artificial Sequence; identical to SEQ ID NO: 29884
  Description of Artificial Sequence: Synthetic casein;  5' sequence and inner sequence

SEQ ID NO: 49714 - DNA, 53 bp, Artificial Sequence; identical to SEQ ID NO: 17770
  Description of Artificial Sequence: Synthetic casein;  5' sequence and inner sequence

SEQ ID NO: 49715 - DNA, 53 bp, Artificial Sequence; identical to SEQ ID NO: 21669
  Description of Artificial Sequence: Synthetic casein;  5' sequence and inner sequence

SEQ ID NO: 49716 - DNA, 53 bp, Artificial Sequence
  Description of Artificial Sequence: Synthetic casein;  5' sequence and inner sequence
tagggaagagaaggacatatgatggccacagcgtacctcaacgtggacatgca

SEQ ID NO: 49717 - DNA, 53 bp, Artificial Sequence; identical to SEQ ID NO: 45805
  Description of Artificial Sequence: Synthetic casein;  5' sequence and inner sequence

SEQ ID NO: 49718 - DNA, 53 bp, Artificial Sequence
  Description of Artificial Sequence: Synthetic casein;  5' sequence and inner sequence
tagggaagagaaggacatatgatcgatacgtacgtagcatgcgatgtgacgca

SEQ ID NO: 49719 - DNA, 53 bp, Artificial Sequence; identical to SEQ ID NO: 21410
  Description of Artificial Sequence: Synthetic casein;  5' sequence and inner sequence

SEQ ID NO: 49720 - DNA, 53 bp, Artificial Sequence
  Description of Artificial Sequence: Synthetic casein;  5' sequence and inner sequence
tagggaagagaaggacatatgatgcattacgcagccatacgcctcgatgcacg

SEQ ID NO: 49721 - DNA, 53 bp, Artificial Sequence; identical to SEQ ID NO: 45739
  Description of Artificial Sequence: Synthetic casein;  5' sequence and inner sequence

SEQ ID NO: 49722 - DNA, 53 bp, Artificial Sequence; identical to SEQ ID NO: 45663
  Description of Artificial Sequence: Synthetic casein;  5' sequence and inner sequence

SEQ ID NO: 49723 - DNA, 53 bp, Artificial Sequence; identical to SEQ ID NO: 45642
  Description of Artificial Sequence: Synthetic casein;  5' sequence and inner sequence

SEQ ID NO: 49724 - DNA, 53 bp, Artificial Sequence
  Description of Artificial Sequence: Synthetic casein;  5' sequence and inner sequence
tagggaagagaaggacatatgatgcaacacagcgttacgtacgacacgacacc

SEQ ID NO: 49725 - DNA, 53 bp, Artificial Sequence; identical to SEQ ID NO: 45936
  Description of Artificial Sequence: Synthetic casein;  5' sequence and inner sequence

SEQ ID NO: 49726 - DNA, 53 bp, Artificial Sequence
  Description of Artificial Sequence: Synthetic casein;  5' sequence and inner sequence
tagggaagagaaggacatatgatgatgcgtacgtcacgtcgtagtgctgcgcg

SEQ ID NO: 49727 - DNA, 53 bp, Artificial Sequence
  Description of Artificial Sequence: Synthetic casein;  5' sequence and inner sequence
tagggaagagaaggacatatgatcgcgatgaggtgacgtgccttccgtacgcg

SEQ ID NO: 49728 - DNA, 53 bp, Artificial Sequence; identical to SEQ ID NO: 21644
  Description of Artificial Sequence: Synthetic casein;  5' sequence and inner sequence

SEQ ID NO: 49729 - DNA, 53 bp, Artificial Sequence
  Description of Artificial Sequence: Synthetic casein;  5' sequence and inner sequence
tagggaagagaaggacatatgatacgtgtgccgcgcaacgtgatgtgtgcaca

SEQ ID NO: 49730 - DNA, 53 bp, Artificial Sequence; identical to SEQ ID NO: 21807
  Description of Artificial Sequence: Synthetic casein;  5' sequence and inner sequence

SEQ ID NO: 49731 - DNA, 53 bp, Artificial Sequence; identical to SEQ ID NO: 13945
  Description of Artificial Sequence: Synthetic casein;  5' sequence and inner sequence

SEQ ID NO: 49732 - DNA, 53 bp, Artificial Sequence; identical to SEQ ID NO: 45865
  Description of Artificial Sequence: Synthetic casein;  5' sequence and inner sequence

SEQ ID NO: 49733 - DNA, 53 bp, Artificial Sequence; identical to SEQ ID NO: 45879
  Description of Artificial Sequence: Synthetic casein;  5' sequence and inner sequence

SEQ ID NO: 49734 - DNA, 53 bp, Artificial Sequence; identical to SEQ ID NO: 1129
  Description of Artificial Sequence: Synthetic casein;  5' sequence and inner sequence

SEQ ID NO: 49735 - DNA, 53 bp, Artificial Sequence; identical to SEQ ID NO: 45723
  Description of Artificial Sequence: Synthetic casein;  5' sequence and inner sequence

SEQ ID NO: 49736 - DNA, 53 bp, Artificial Sequence; identical to SEQ ID NO: 1576
  Description of Artificial Sequence: Synthetic casein;  5' sequence and inner sequence

SEQ ID NO: 49737 - DNA, 53 bp, Artificial Sequence
  Description of Artificial Sequence: Synthetic casein;  5' sequence and inner sequence
tagggaagagaaggacatatgatgtcatgcacgaacactatcatggccgcatg

SEQ ID NO: 49738 - DNA, 53 bp, Artificial Sequence; identical to SEQ ID NO: 21502
  Description of Artificial Sequence: Synthetic casein;  5' sequence and inner sequence

SEQ ID NO: 49739 - DNA, 53 bp, Artificial Sequence
  Description of Artificial Sequence: Synthetic casein;  5' sequence and inner sequence
tagggaagagaaggacatatgatcgatacgccatgatgtccgtgatctgcacg

SEQ ID NO: 49740 - DNA, 53 bp, Artificial Sequence; identical to SEQ ID NO: 1789
  Description of Artificial Sequence: Synthetic casein;  5' sequence and inner sequence

SEQ ID NO: 49741 - DNA, 52 bp, Artificial Sequence
  Description of Artificial Sequence: Synthetic casein;  5' sequence and inner sequence
tagggaagagaaggacatatgatacgtgtgcggaacgtgtgtgccatacgca

SEQ ID NO: 49742 - DNA, 51 bp, Artificial Sequence
  Description of Artificial Sequence: Synthetic casein;  5' sequence and inner sequence
tagggaagagaaggacatatgatggacgcaacgtaccgcatcgtggccatg

SEQ ID NO: 49743 - DNA, 53 bp, Artificial Sequence; identical to SEQ ID NO: 5918
  Description of Artificial Sequence: Synthetic casein;  5' sequence and inner sequence

SEQ ID NO: 49744 - DNA, 53 bp, Artificial Sequence; identical to SEQ ID NO: 21820
  Description of Artificial Sequence: Synthetic casein;  5' sequence and inner sequence

SEQ ID NO: 49745 - DNA, 53 bp, Artificial Sequence; identical to SEQ ID NO: 33619
  Description of Artificial Sequence: Synthetic casein;  5' sequence and inner sequence

SEQ ID NO: 49746 - DNA, 53 bp, Artificial Sequence
  Description of Artificial Sequence: Synthetic casein;  5' sequence and inner sequence
tagggaagagaaggacatatgatcgtatggcaggcacgtcacgtatgcgtggt

SEQ ID NO: 49747 - DNA, 53 bp, Artificial Sequence; identical to SEQ ID NO: 29329
  Description of Artificial Sequence: Synthetic casein;  5' sequence and inner sequence

SEQ ID NO: 49748 - DNA, 53 bp, Artificial Sequence; identical to SEQ ID NO: 45845
  Description of Artificial Sequence: Synthetic casein;  5' sequence and inner sequence

SEQ ID NO: 49749 - DNA, 53 bp, Artificial Sequence; identical to SEQ ID NO: 1991
  Description of Artificial Sequence: Synthetic casein;  5' sequence and inner sequence

SEQ ID NO: 49750 - DNA, 53 bp, Artificial Sequence; identical to SEQ ID NO: 1853
  Description of Artificial Sequence: Synthetic casein;  5' sequence and inner sequence

SEQ ID NO: 49751 - DNA, 53 bp, Artificial Sequence; identical to SEQ ID NO: 21853
  Description of Artificial Sequence: Synthetic casein;  5' sequence and inner sequence

SEQ ID NO: 49752 - DNA, 53 bp, Artificial Sequence
  Description of Artificial Sequence: Synthetic casein;  5' sequence and inner sequence
tagggaagagaaggacatatgatacgtcacgtcacgtaggtatggctgacgcg

SEQ ID NO: 49753 - DNA, 53 bp, Artificial Sequence; identical to SEQ ID NO: 1088
  Description of Artificial Sequence: Synthetic casein;  5' sequence and inner sequence

SEQ ID NO: 49754 - DNA, 53 bp, Artificial Sequence; identical to SEQ ID NO: 17698
  Description of Artificial Sequence: Synthetic casein;  5' sequence and inner sequence

SEQ ID NO: 49755 - DNA, 53 bp, Artificial Sequence; identical to SEQ ID NO: 1754
  Description of Artificial Sequence: Synthetic casein;  5' sequence and inner sequence

SEQ ID NO: 49756 - DNA, 53 bp, Artificial Sequence; identical to SEQ ID NO: 45771
  Description of Artificial Sequence: Synthetic casein;  5' sequence and inner sequence

SEQ ID NO: 49757 - DNA, 53 bp, Artificial Sequence
  Description of Artificial Sequence: Synthetic casein;  5' sequence and inner sequence
tagggaagagaaggacatatgatcgtacgcacacggaccgcatgtaccgcatg

SEQ ID NO: 49758 - DNA, 53 bp, Artificial Sequence; identical to SEQ ID NO: 1159
  Description of Artificial Sequence: Synthetic casein;  5' sequence and inner sequence

SEQ ID NO: 49759 - DNA, 53 bp, Artificial Sequence; identical to SEQ ID NO: 33484
  Description of Artificial Sequence: Synthetic casein;  5' sequence and inner sequence

SEQ ID NO: 49760 - DNA, 53 bp, Artificial Sequence; identical to SEQ ID NO: 45733
  Description of Artificial Sequence: Synthetic casein;  5' sequence and inner sequence

SEQ ID NO: 49761 - DNA, 53 bp, Artificial Sequence; identical to SEQ ID NO: 21976
  Description of Artificial Sequence: Synthetic casein;  5' sequence and inner sequence

SEQ ID NO: 49762 - DNA, 53 bp, Artificial Sequence; identical to SEQ ID NO: 9985
  Description of Artificial Sequence: Synthetic casein;  5' sequence and inner sequence

SEQ ID NO: 49763 - DNA, 53 bp, Artificial Sequence; identical to SEQ ID NO: 45907
  Description of Artificial Sequence: Synthetic casein;  5' sequence and inner sequence

SEQ ID NO: 49764 - DNA, 53 bp, Artificial Sequence
  Description of Artificial Sequence: Synthetic casein;  5' sequence and inner sequence
tagggaagagaaggacatatgatcgacagcatggcgaggtacgcaacgtcacg

SEQ ID NO: 49765 - DNA, 53 bp, Artificial Sequence; identical to SEQ ID NO: 1497
  Description of Artificial Sequence: Synthetic casein;  5' sequence and inner sequence

SEQ ID NO: 49766 - DNA, 53 bp, Artificial Sequence; identical to SEQ ID NO: 1840
  Description of Artificial Sequence: Synthetic casein;  5' sequence and inner sequence

SEQ ID NO: 49767 - DNA, 53 bp, Artificial Sequence
  Description of Artificial Sequence: Synthetic casein;  5' sequence and inner sequence
tagggaagagaaggacatatgatgcgatgcgacaacgatgtccgtgctgtacg

SEQ ID NO: 49768 - DNA, 53 bp, Artificial Sequence; identical to SEQ ID NO: 33084
  Description of Artificial Sequence: Synthetic casein;  5' sequence and inner sequence

SEQ ID NO: 49769 - DNA, 53 bp, Artificial Sequence; identical to SEQ ID NO: 1512
  Description of Artificial Sequence: Synthetic casein;  5' sequence and inner sequence

SEQ ID NO: 49770 - DNA, 53 bp, Artificial Sequence; identical to SEQ ID NO: 5517
  Description of Artificial Sequence: Synthetic casein;  5' sequence and inner sequence

SEQ ID NO: 49771 - DNA, 53 bp, Artificial Sequence
  Description of Artificial Sequence: Synthetic casein;  5' sequence and inner sequence
tagggaagagaaggacatatgattgcgttacgtacgcatgcctcgacgtcacg

SEQ ID NO: 49772 - DNA, 53 bp, Artificial Sequence; identical to SEQ ID NO: 45782
  Description of Artificial Sequence: Synthetic casein;  5' sequence and inner sequence

SEQ ID NO: 49773 - DNA, 53 bp, Artificial Sequence
  Description of Artificial Sequence: Synthetic casein;  5' sequence and inner sequence
tagggaagagaaggacatatgatgcgatacgcgatcacaccttccgttgcacg

SEQ ID NO: 49774 - DNA, 53 bp, Artificial Sequence
  Description of Artificial Sequence: Synthetic casein;  5' sequence and inner sequence
tagggaagagaaggacatatgatacgtgcacagcatgcgttcgatccgtcacg

SEQ ID NO: 49775 - DNA, 53 bp, Artificial Sequence; identical to SEQ ID NO: 33136
  Description of Artificial Sequence: Synthetic casein;  5' sequence and inner sequence

SEQ ID NO: 49776 - DNA, 53 bp, Artificial Sequence
  Description of Artificial Sequence: Synthetic casein;  5' sequence and inner sequence
tagggaagagaaggacatatgatgcatgaggacgtgacggaacggtgtgcgtg

SEQ ID NO: 49777 - DNA, 53 bp, Artificial Sequence
  Description of Artificial Sequence: Synthetic casein;  5' sequence and inner sequence
tagggaagagaaggacatatgatgtcatgcacgatcactatcatggcggcatg

SEQ ID NO: 49778 - DNA, 53 bp, Artificial Sequence; identical to SEQ ID NO: 1920
  Description of Artificial Sequence: Synthetic casein;  5' sequence and inner sequence

SEQ ID NO: 49779 - DNA, 53 bp, Artificial Sequence; identical to SEQ ID NO: 1685
  Description of Artificial Sequence: Synthetic casein;  5' sequence and inner sequence

SEQ ID NO: 49780 - DNA, 53 bp, Artificial Sequence
  Description of Artificial Sequence: Synthetic casein;  5' sequence and inner sequence
tagggaagagaaggacatatgatggcatgcgatgtacgaggcatgatgcgtca

SEQ ID NO: 49781 - DNA, 53 bp, Artificial Sequence
  Description of Artificial Sequence: Synthetic casein;  5' sequence and inner sequence
tagggaagagaaggacatatgatcacgtaccagcgcatgtccgacacgtcacg

SEQ ID NO: 49782 - DNA, 53 bp, Artificial Sequence
  Description of Artificial Sequence: Synthetic casein;  5' sequence and inner sequence
tagggaagagaaggacatatgatcgtgtggcacgacaacacgttccgtccacg

SEQ ID NO: 49783 - DNA, 53 bp, Artificial Sequence
  Description of Artificial Sequence: Synthetic casein;  5' sequence and inner sequence
tagggaagagaaggacatatgatgccctgcacgcaccctatcatgtaggcatg

SEQ ID NO: 49784 - DNA, 53 bp, Artificial Sequence
  Description of Artificial Sequence: Synthetic casein;  5' sequence and inner sequence
tagggaagagaaggacatatgatgcacgtacggacgatgcgtgtgccttcgca

SEQ ID NO: 49785 - DNA, 53 bp, Artificial Sequence; identical to SEQ ID NO: 45820
  Description of Artificial Sequence: Synthetic casein;  5' sequence and inner sequence

SEQ ID NO: 49786 - DNA, 53 bp, Artificial Sequence
  Description of Artificial Sequence: Synthetic casein;  5' sequence and inner sequence
tagggaagagaaggacatatgatgcacgactcgcaccctatcatgtagccatg

SEQ ID NO: 49787 - DNA, 53 bp, Artificial Sequence
  Description of Artificial Sequence: Synthetic casein;  5' sequence and inner sequence
tagggaagagaaggacatatgatagcgtgcatgctcacgtgacgtactgcgtg

SEQ ID NO: 49788 - DNA, 53 bp, Artificial Sequence; identical to SEQ ID NO: 45637
  Description of Artificial Sequence: Synthetic casein;  5' sequence and inner sequence

SEQ ID NO: 49789 - DNA, 53 bp, Artificial Sequence; identical to SEQ ID NO: 1580
  Description of Artificial Sequence: Synthetic casein;  5' sequence and inner sequence

SEQ ID NO: 49790 - DNA, 53 bp, Artificial Sequence; identical to SEQ ID NO: 5617
  Description of Artificial Sequence: Synthetic casein;  5' sequence and inner sequence

SEQ ID NO: 49791 - DNA, 53 bp, Artificial Sequence
  Description of Artificial Sequence: Synthetic casein;  5' sequence and inner sequence
tagggaagagaaggacatatgatacgtcacgttgcatcgtagctgtgtccgcc

SEQ ID NO: 49792 - DNA, 53 bp, Artificial Sequence; identical to SEQ ID NO: 45609
  Description of Artificial Sequence: Synthetic casein;  5' sequence and inner sequence

SEQ ID NO: 49793 - DNA, 53 bp, Artificial Sequence; identical to SEQ ID NO: 21899
  Description of Artificial Sequence: Synthetic casein;  5' sequence and inner sequence

SEQ ID NO: 49794 - DNA, 53 bp, Artificial Sequence; identical to SEQ ID NO: 45599
  Description of Artificial Sequence: Synthetic casein;  5' sequence and inner sequence

SEQ ID NO: 49795 - DNA, 53 bp, Artificial Sequence; identical to SEQ ID NO: 1498
  Description of Artificial Sequence: Synthetic casein;  5' sequence and inner sequence

SEQ ID NO: 49796 - DNA, 53 bp, Artificial Sequence
  Description of Artificial Sequence: Synthetic casein;  5' sequence and inner sequence
tagggaagagaaggacatatgatcgtgacgtgcgtgcagttacgtgtgccacg

SEQ ID NO: 49797 - DNA, 53 bp, Artificial Sequence; identical to SEQ ID NO: 17726
  Description of Artificial Sequence: Synthetic casein;  5' sequence and inner sequence

SEQ ID NO: 49798 - DNA, 53 bp, Artificial Sequence
  Description of Artificial Sequence: Synthetic casein;  5' sequence and inner sequence
tagggaagagaaggacatatgatggtacgcatcgaccacgcaacacgtgcgca

SEQ ID NO: 49799 - DNA, 53 bp, Artificial Sequence; identical to SEQ ID NO: 17412
  Description of Artificial Sequence: Synthetic casein;  5' sequence and inner sequence

SEQ ID NO: 49800 - DNA, 53 bp, Artificial Sequence; identical to SEQ ID NO: 29836
  Description of Artificial Sequence: Synthetic casein;  5' sequence and inner sequence

SEQ ID NO: 49801 - DNA, 53 bp, Artificial Sequence; identical to SEQ ID NO: 45834
  Description of Artificial Sequence: Synthetic casein;  5' sequence and inner sequence

SEQ ID NO: 49802 - DNA, 53 bp, Artificial Sequence
  Description of Artificial Sequence: Synthetic casein;  5' sequence and inner sequence
tagggaagagaaggacatatgatcgtaccgcacgcagtcgataggcatgcaca

SEQ ID NO: 49803 - DNA, 53 bp, Artificial Sequence; identical to SEQ ID NO: 21533
  Description of Artificial Sequence: Synthetic casein;  5' sequence and inner sequence

SEQ ID NO: 49804 - DNA, 53 bp, Artificial Sequence
  Description of Artificial Sequence: Synthetic casein;  5' sequence and inner sequence
tagggaagagaaggacatatgatacgtgtacgtagcatgtcgcgatctgcacg

SEQ ID NO: 49805 - DNA, 53 bp, Artificial Sequence; identical to SEQ ID NO: 1923
  Description of Artificial Sequence: Synthetic casein;  5' sequence and inner sequence

SEQ ID NO: 49806 - DNA, 53 bp, Artificial Sequence; identical to SEQ ID NO: 1717
  Description of Artificial Sequence: Synthetic casein;  5' sequence and inner sequence

SEQ ID NO: 49807 - DNA, 53 bp, Artificial Sequence; identical to SEQ ID NO: 33622
  Description of Artificial Sequence: Synthetic casein;  5' sequence and inner sequence

SEQ ID NO: 49808 - DNA, 53 bp, Artificial Sequence; identical to SEQ ID NO: 46001
  Description of Artificial Sequence: Synthetic casein;  5' sequence and inner sequence

SEQ ID NO: 49809 - DNA, 53 bp, Artificial Sequence; identical to SEQ ID NO: 45487
  Description of Artificial Sequence: Synthetic casein;  5' sequence and inner sequence

SEQ ID NO: 49810 - DNA, 53 bp, Artificial Sequence
  Description of Artificial Sequence: Synthetic casein;  5' sequence and inner sequence
tagggaagagaaggacatatgatgacgtgacgcgatcggtacgtgacgttgcg

SEQ ID NO: 49811 - DNA, 53 bp, Artificial Sequence
  Description of Artificial Sequence: Synthetic casein;  5' sequence and inner sequence
tagggaagagaaggacatatgatggacgcaccgtaccgtatcgtggccatgta

SEQ ID NO: 49812 - DNA, 53 bp, Artificial Sequence
  Description of Artificial Sequence: Synthetic casein;  5' sequence and inner sequence
tagggaagagaaggacatatgatgcacgtgcacatgcctcgtttcgcgtcacg

SEQ ID NO: 49813 - DNA, 53 bp, Artificial Sequence
  Description of Artificial Sequence: Synthetic casein;  5' sequence and inner sequence
tagggaagagaaggacatatgatgacgtgatgcgtgtcgtatgtgccttgtgc

SEQ ID NO: 49814 - DNA, 53 bp, Artificial Sequence; identical to SEQ ID NO: 21736
  Description of Artificial Sequence: Synthetic casein;  5' sequence and inner sequence

SEQ ID NO: 49815 - DNA, 53 bp, Artificial Sequence; identical to SEQ ID NO: 45580
  Description of Artificial Sequence: Synthetic casein;  5' sequence and inner sequence

SEQ ID NO: 49816 - DNA, 53 bp, Artificial Sequence; identical to SEQ ID NO: 45635
  Description of Artificial Sequence: Synthetic casein;  5' sequence and inner sequence

SEQ ID NO: 49817 - DNA, 53 bp, Artificial Sequence
  Description of Artificial Sequence: Synthetic casein;  5' sequence and inner sequence
tagggaagagaaggacatatgatccatgcatcacgtcgtcacgcagcctcacg

SEQ ID NO: 49818 - DNA, 53 bp, Artificial Sequence; identical to SEQ ID NO: 1055
  Description of Artificial Sequence: Synthetic casein;  5' sequence and inner sequence

SEQ ID NO: 49819 - DNA, 53 bp, Artificial Sequence; identical to SEQ ID NO: 1029
  Description of Artificial Sequence: Synthetic casein;  5' sequence and inner sequence

SEQ ID NO: 49820 - DNA, 53 bp, Artificial Sequence
  Description of Artificial Sequence: Synthetic casein;  5' sequence and inner sequence
tagggaagagaaggacatatgatccatcgcgtcacatggtacggtgcgacacg

SEQ ID NO: 49821 - DNA, 53 bp, Artificial Sequence; identical to SEQ ID NO: 33341
  Description of Artificial Sequence: Synthetic casein;  5' sequence and inner sequence

SEQ ID NO: 49822 - DNA, 53 bp, Artificial Sequence
  Description of Artificial Sequence: Synthetic casein;  5' sequence and inner sequence
tagggaagagaaggacatatgatcacgccacatcgtgacatagggcatgcgcg

SEQ ID NO: 49823 - DNA, 53 bp, Artificial Sequence; identical to SEQ ID NO: 1553
  Description of Artificial Sequence: Synthetic casein;  5' sequence and inner sequence

SEQ ID NO: 49824 - DNA, 53 bp, Artificial Sequence
  Description of Artificial Sequence: Synthetic casein;  5' sequence and inner sequence
tagggaagagaaggacatatgatcacgtcacgcatcagatgtcgcacttcacg

SEQ ID NO: 49825 - DNA, 53 bp, Artificial Sequence; identical to SEQ ID NO: 45732
  Description of Artificial Sequence: Synthetic casein;  5' sequence and inner sequence

SEQ ID NO: 49826 - DNA, 53 bp, Artificial Sequence; identical to SEQ ID NO: 17866
  Description of Artificial Sequence: Synthetic casein;  5' sequence and inner sequence

SEQ ID NO: 49827 - DNA, 53 bp, Artificial Sequence
  Description of Artificial Sequence: Synthetic casein;  5' sequence and inner sequence
tagggaagagaaggacatatgatgcgatgaagcatgcgtacgtcctgcgcacg

SEQ ID NO: 49828 - DNA, 53 bp, Artificial Sequence
  Description of Artificial Sequence: Synthetic casein;  5' sequence and inner sequence
tagggaagagaaggacatatgatgtcacgcaggacgatgcgatgtgcttcgcg

SEQ ID NO: 49829 - DNA, 53 bp, Artificial Sequence; identical to SEQ ID NO: 21946
  Description of Artificial Sequence: Synthetic casein;  5' sequence and inner sequence

SEQ ID NO: 49830 - DNA, 53 bp, Artificial Sequence; identical to SEQ ID NO: 1488
  Description of Artificial Sequence: Synthetic casein;  5' sequence and inner sequence

SEQ ID NO: 49831 - DNA, 53 bp, Artificial Sequence
  Description of Artificial Sequence: Synthetic casein;  5' sequence and inner sequence
tagggaagagaaggacatatgatgacacgtcacgatgcacgtactacgacacg

SEQ ID NO: 49832 - DNA, 53 bp, Artificial Sequence; identical to SEQ ID NO: 1429
  Description of Artificial Sequence: Synthetic casein;  5' sequence and inner sequence

SEQ ID NO: 49833 - DNA, 53 bp, Artificial Sequence; identical to SEQ ID NO: 45953
  Description of Artificial Sequence: Synthetic casein;  5' sequence and inner sequence

SEQ ID NO: 49834 - DNA, 53 bp, Artificial Sequence; identical to SEQ ID NO: 17561
  Description of Artificial Sequence: Synthetic casein;  5' sequence and inner sequence

SEQ ID NO: 49835 - DNA, 53 bp, Artificial Sequence
  Description of Artificial Sequence: Synthetic casein;  5' sequence and inner sequence
tagggaagagaaggacatatgatgccgtgacgatgacgtgttggacatgcacc

SEQ ID NO: 49836 - DNA, 53 bp, Artificial Sequence
  Description of Artificial Sequence: Synthetic casein;  5' sequence and inner sequence
tagggaagagaaggacatatgatgcgtgacatggcaggcacacgttacgcaca

SEQ ID NO: 49837 - DNA, 53 bp, Artificial Sequence
  Description of Artificial Sequence: Synthetic casein;  5' sequence and inner sequence
tagggaagagaaggacatatgatgcatcgtgcagcacgtccactcgatgcacg

SEQ ID NO: 49838 - DNA, 53 bp, Artificial Sequence; identical to SEQ ID NO: 45889
  Description of Artificial Sequence: Synthetic casein;  5' sequence and inner sequence

SEQ ID NO: 49839 - DNA, 53 bp, Artificial Sequence; identical to SEQ ID NO: 29595
  Description of Artificial Sequence: Synthetic casein;  5' sequence and inner sequence

SEQ ID NO: 49840 - DNA, 53 bp, Artificial Sequence
  Description of Artificial Sequence: Synthetic casein;  5' sequence and inner sequence
tagggaagagaaggacatatgatgcatacgacatcgatacgtaccgctgcacg

SEQ ID NO: 49841 - DNA, 53 bp, Artificial Sequence; identical to SEQ ID NO: 45643
  Description of Artificial Sequence: Synthetic casein;  5' sequence and inner sequence

SEQ ID NO: 49842 - DNA, 55 bp, Artificial Sequence
  Description of Artificial Sequence: Synthetic casein;  5' sequence and inner sequence
tagggaagagaaggacatatgatgtcactgtgcctgaccgtcaagttgcggcatg

SEQ ID NO: 49843 - DNA, 53 bp, Artificial Sequence; identical to SEQ ID NO: 21594
  Description of Artificial Sequence: Synthetic casein;  5' sequence and inner sequence

SEQ ID NO: 49844 - DNA, 53 bp, Artificial Sequence
  Description of Artificial Sequence: Synthetic casein;  5' sequence and inner sequence
tagggaagagaaggacatatgatgcgtgacgatacgtaccgatgtgatgcgca

SEQ ID NO: 49845 - DNA, 53 bp, Artificial Sequence
  Description of Artificial Sequence: Synthetic casein;  5' sequence and inner sequence
tagggaagagaaggacatatgatgcaacacgatgcaccgtacggatcggcacg

SEQ ID NO: 49846 - DNA, 53 bp, Artificial Sequence
  Description of Artificial Sequence: Synthetic casein;  5' sequence and inner sequence
tagggaagagaaggacatatgatggacgcaacgtaccgtatcgtggccctgta

SEQ ID NO: 49847 - DNA, 53 bp, Artificial Sequence
  Description of Artificial Sequence: Synthetic casein;  5' sequence and inner sequence
tagggaagagaaggacatatgatgcatacggcacaggcagcacgtacgccacg

SEQ ID NO: 49848 - DNA, 53 bp, Artificial Sequence; identical to SEQ ID NO: 1292
  Description of Artificial Sequence: Synthetic casein;  5' sequence and inner sequence

SEQ ID NO: 49849 - DNA, 53 bp, Artificial Sequence; identical to SEQ ID NO: 21343
  Description of Artificial Sequence: Synthetic casein;  5' sequence and inner sequence

SEQ ID NO: 49850 - DNA, 53 bp, Artificial Sequence; identical to SEQ ID NO: 21690
  Description of Artificial Sequence: Synthetic casein;  5' sequence and inner sequence

SEQ ID NO: 49851 - DNA, 53 bp, Artificial Sequence; identical to SEQ ID NO: 17692
  Description of Artificial Sequence: Synthetic casein;  5' sequence and inner sequence

SEQ ID NO: 49852 - DNA, 53 bp, Artificial Sequence
  Description of Artificial Sequence: Synthetic casein;  5' sequence and inner sequence
tagggaagagaaggacatatgatcgtgccgaacggatcgtatgacgtgacgca

SEQ ID NO: 49853 - DNA, 53 bp, Artificial Sequence; identical to SEQ ID NO: 21700
  Description of Artificial Sequence: Synthetic casein;  5' sequence and inner sequence

SEQ ID NO: 49854 - DNA, 53 bp, Artificial Sequence; identical to SEQ ID NO: 21353
  Description of Artificial Sequence: Synthetic casein;  5' sequence and inner sequence

SEQ ID NO: 49855 - DNA, 53 bp, Artificial Sequence; identical to SEQ ID NO: 1196
  Description of Artificial Sequence: Synthetic casein;  5' sequence and inner sequence

SEQ ID NO: 49856 - DNA, 53 bp, Artificial Sequence
  Description of Artificial Sequence: Synthetic casein;  5' sequence and inner sequence
tagggaagagaaggacatatgatgcacgcaacgtaccgtatcgtggccatgta

SEQ ID NO: 49857 - DNA, 53 bp, Artificial Sequence; identical to SEQ ID NO: 37827
  Description of Artificial Sequence: Synthetic casein;  5' sequence and inner sequence

SEQ ID NO: 49858 - DNA, 53 bp, Artificial Sequence
  Description of Artificial Sequence: Synthetic casein;  5' sequence and inner sequence
tagggaagagaaggacatatgatggacgcaacgtcccgtatcgtggccatgtg

SEQ ID NO: 49859 - DNA, 53 bp, Artificial Sequence; identical to SEQ ID NO: 45901
  Description of Artificial Sequence: Synthetic casein;  5' sequence and inner sequence

SEQ ID NO: 49860 - DNA, 53 bp, Artificial Sequence; identical to SEQ ID NO: 9949
  Description of Artificial Sequence: Synthetic casein;  5' sequence and inner sequence

SEQ ID NO: 49861 - DNA, 53 bp, Artificial Sequence
  Description of Artificial Sequence: Synthetic casein;  5' sequence and inner sequence
tagggaagagaaggacatatgatcacgtccacacgcgatgcatcacgtacgca

SEQ ID NO: 49862 - DNA, 53 bp, Artificial Sequence
  Description of Artificial Sequence: Synthetic casein;  5' sequence and inner sequence
tagggaagagaaggacatatgatcgtaacgcacgatgcacggtatgtggcaca

SEQ ID NO: 49863 - DNA, 53 bp, Artificial Sequence; identical to SEQ ID NO: 17715
  Description of Artificial Sequence: Synthetic casein;  5' sequence and inner sequence

SEQ ID NO: 49864 - DNA, 53 bp, Artificial Sequence
  Description of Artificial Sequence: Synthetic casein;  5' sequence and inner sequence
tagggaagagaaggacatatgatcgtgacacggtgcgtgacgttacctgcgcg

SEQ ID NO: 49865 - DNA, 53 bp, Artificial Sequence; identical to SEQ ID NO: 1505
  Description of Artificial Sequence: Synthetic casein;  5' sequence and inner sequence

SEQ ID NO: 49866 - DNA, 53 bp, Artificial Sequence
  Description of Artificial Sequence: Synthetic casein;  5' sequence and inner sequence
tagggaagagaaggacatatgatggacgcatcgtaccgtatcgtggccatgtg

SEQ ID NO: 49867 - DNA, 48 bp, Artificial Sequence; identical to SEQ ID NO: 21741
  Description of Artificial Sequence: Synthetic casein;  5' sequence and inner sequence

SEQ ID NO: 49868 - DNA, 53 bp, Artificial Sequence; identical to SEQ ID NO: 21974
  Description of Artificial Sequence: Synthetic casein;  5' sequence and inner sequence

SEQ ID NO: 49869 - DNA, 53 bp, Artificial Sequence; identical to SEQ ID NO: 29864
  Description of Artificial Sequence: Synthetic casein;  5' sequence and inner sequence

SEQ ID NO: 49870 - DNA, 53 bp, Artificial Sequence; identical to SEQ ID NO: 1167
  Description of Artificial Sequence: Synthetic casein;  5' sequence and inner sequence

SEQ ID NO: 49871 - DNA, 53 bp, Artificial Sequence; identical to SEQ ID NO: 29620
  Description of Artificial Sequence: Synthetic casein;  5' sequence and inner sequence

SEQ ID NO: 49872 - DNA, 53 bp, Artificial Sequence
  Description of Artificial Sequence: Synthetic casein;  5' sequence and inner sequence
tagggaagagaaggacatatgatgcgtcaggatggacgtactctcacgtcacg

SEQ ID NO: 49873 - DNA, 53 bp, Artificial Sequence; identical to SEQ ID NO: 29848
  Description of Artificial Sequence: Synthetic casein;  5' sequence and inner sequence

SEQ ID NO: 49874 - DNA, 53 bp, Artificial Sequence; identical to SEQ ID NO: 17750
  Description of Artificial Sequence: Synthetic casein;  5' sequence and inner sequence

SEQ ID NO: 49875 - DNA, 52 bp, Artificial Sequence; identical to SEQ ID NO: 1549
  Description of Artificial Sequence: Synthetic casein;  5' sequence and inner sequence

SEQ ID NO: 49876 - DNA, 53 bp, Artificial Sequence
  Description of Artificial Sequence: Synthetic casein;  5' sequence and inner sequence
tagggaagagaaggacatatgatcgatgcgcatcgtatcggcacagtgacgcg

SEQ ID NO: 49877 - DNA, 53 bp, Artificial Sequence
  Description of Artificial Sequence: Synthetic casein;  5' sequence and inner sequence
tagggaagagaaggacatatgatggccacagcgtacctcaacgtggacgtgcg

SEQ ID NO: 49878 - DNA, 53 bp, Artificial Sequence
  Description of Artificial Sequence: Synthetic casein;  5' sequence and inner sequence
tagggaagagaaggacatatgatggcatgcgatgaacgaggcatgttgcgtca

SEQ ID NO: 49879 - DNA, 53 bp, Artificial Sequence; identical to SEQ ID NO: 1044
  Description of Artificial Sequence: Synthetic casein;  5' sequence and inner sequence

SEQ ID NO: 49880 - DNA, 53 bp, Artificial Sequence
  Description of Artificial Sequence: Synthetic casein;  5' sequence and inner sequence
tagggaagagaaggacatatgatgcgtcacacgtagcgttacgggacggcacg

SEQ ID NO: 49881 - DNA, 52 bp, Artificial Sequence; identical to SEQ ID NO: 5869
  Description of Artificial Sequence: Synthetic casein;  5' sequence and inner sequence

SEQ ID NO: 49882 - DNA, 53 bp, Artificial Sequence; identical to SEQ ID NO: 1185
  Description of Artificial Sequence: Synthetic casein;  5' sequence and inner sequence

SEQ ID NO: 49883 - DNA, 52 bp, Artificial Sequence
  Description of Artificial Sequence: Synthetic casein;  5' sequence and inner sequence
tagggaagagaaggacatatgatgcgtgccatcgtacgtatcgcactgtgca

SEQ ID NO: 49884 - DNA, 53 bp, Artificial Sequence; identical to SEQ ID NO: 21913
  Description of Artificial Sequence: Synthetic casein;  5' sequence and inner sequence

SEQ ID NO: 49885 - DNA, 53 bp, Artificial Sequence
  Description of Artificial Sequence: Synthetic casein;  5' sequence and inner sequence
tagggaagagaaggacatatgatcgtgttgcacgtactcatgctgccttcgcg

SEQ ID NO: 49886 - DNA, 53 bp, Artificial Sequence
  Description of Artificial Sequence: Synthetic casein;  5' sequence and inner sequence
tagggaagagaaggacatatgatcgacatgtcgcactgaccgtcacgtacacg

SEQ ID NO: 49887 - DNA, 53 bp, Artificial Sequence; identical to SEQ ID NO: 1186
  Description of Artificial Sequence: Synthetic casein;  5' sequence and inner sequence

SEQ ID NO: 49888 - DNA, 53 bp, Artificial Sequence
  Description of Artificial Sequence: Synthetic casein;  5' sequence and inner sequence
tagggaagagaaggacatatgatcgtacgtacgcaggcacgttcccgttcgtg

SEQ ID NO: 49889 - DNA, 53 bp, Artificial Sequence; identical to SEQ ID NO: 21528
  Description of Artificial Sequence: Synthetic casein;  5' sequence and inner sequence

SEQ ID NO: 49890 - DNA, 53 bp, Artificial Sequence
  Description of Artificial Sequence: Synthetic casein;  5' sequence and inner sequence
tagggaagagaaggacatatgatgcgacgtggcgtaacgtatcgtgcttcgtc

SEQ ID NO: 49891 - DNA, 53 bp, Artificial Sequence; identical to SEQ ID NO: 33304
  Description of Artificial Sequence: Synthetic casein;  5' sequence and inner sequence

SEQ ID NO: 49892 - DNA, 53 bp, Artificial Sequence
  Description of Artificial Sequence: Synthetic casein;  5' sequence and inner sequence
tagggaagagaaggacatatgatacgtgcaggacgacgtgcgtgacgtacgcc

SEQ ID NO: 49893 - DNA, 53 bp, Artificial Sequence; identical to SEQ ID NO: 45301
  Description of Artificial Sequence: Synthetic casein;  5' sequence and inner sequence

SEQ ID NO: 49894 - DNA, 53 bp, Artificial Sequence
  Description of Artificial Sequence: Synthetic casein;  5' sequence and inner sequence
tagggaagagaaggacatatgatacgtgcatgtgacgtgtcgtgcagttcgca

SEQ ID NO: 49895 - DNA, 53 bp, Artificial Sequence
  Description of Artificial Sequence: Synthetic casein;  5' sequence and inner sequence
tagggaagagaaggacatatgatccgtcacacacaaggcacgtacgttgcacg

SEQ ID NO: 49896 - DNA, 53 bp, Artificial Sequence; identical to SEQ ID NO: 1181
  Description of Artificial Sequence: Synthetic casein;  5' sequence and inner sequence

SEQ ID NO: 49897 - DNA, 53 bp, Artificial Sequence; identical to SEQ ID NO: 21733
  Description of Artificial Sequence: Synthetic casein;  5' sequence and inner sequence

SEQ ID NO: 49898 - DNA, 53 bp, Artificial Sequence; identical to SEQ ID NO: 45688
  Description of Artificial Sequence: Synthetic casein;  5' sequence and inner sequence

SEQ ID NO: 49899 - DNA, 53 bp, Artificial Sequence
  Description of Artificial Sequence: Synthetic casein;  5' sequence and inner sequence
tagggaagagaaggacatatgatggacacagcgtacctcaacgtggacgcgca

SEQ ID NO: 49900 - DNA, 53 bp, Artificial Sequence
  Description of Artificial Sequence: Synthetic casein;  5' sequence and inner sequence
tagggaagagaaggacatatgatgcgatacggcatgaccgttgctacgtcacg

SEQ ID NO: 49901 - DNA, 53 bp, Artificial Sequence
  Description of Artificial Sequence: Synthetic casein;  5' sequence and inner sequence
tagggaagagaaggacatatgatggacacagcgtacctcaacgtggccgtgca

SEQ ID NO: 49902 - DNA, 53 bp, Artificial Sequence; identical to SEQ ID NO: 1168
  Description of Artificial Sequence: Synthetic casein;  5' sequence and inner sequence

SEQ ID NO: 49903 - DNA, 53 bp, Artificial Sequence; identical to SEQ ID NO: 1103
  Description of Artificial Sequence: Synthetic casein;  5' sequence and inner sequence

SEQ ID NO: 49904 - DNA, 53 bp, Artificial Sequence; identical to SEQ ID NO: 29948
  Description of Artificial Sequence: Synthetic casein;  5' sequence and inner sequence

SEQ ID NO: 49905 - DNA, 51 bp, Artificial Sequence
  Description of Artificial Sequence: Synthetic casein;  5' sequence and inner sequence
tagggaagagaaggacatatgatgtcatgcacgaacactatcatggcggca

SEQ ID NO: 49906 - DNA, 53 bp, Artificial Sequence
  Description of Artificial Sequence: Synthetic casein;  5' sequence and inner sequence
tagggaagagaaggacatatgatcacgcatgtcgcatcgtccctaccgtcacg

SEQ ID NO: 49907 - DNA, 53 bp, Artificial Sequence
  Description of Artificial Sequence: Synthetic casein;  5' sequence and inner sequence
tagggaagagaaggacatatgatgcgatgcggtacgtcacactgtccgccaca

SEQ ID NO: 49908 - DNA, 53 bp, Artificial Sequence; identical to SEQ ID NO: 29771
  Description of Artificial Sequence: Synthetic casein;  5' sequence and inner sequence

SEQ ID NO: 49909 - DNA, 53 bp, Artificial Sequence
  Description of Artificial Sequence: Synthetic casein;  5' sequence and inner sequence
tagggaagagaaggacatatgatggacgcaacgtaccgtatcgtgaccatgta

SEQ ID NO: 49910 - DNA, 53 bp, Artificial Sequence
  Description of Artificial Sequence: Synthetic casein;  5' sequence and inner sequence
tagggaagagaaggacatatgatggcattcacgcacctacacgtgggcacgta

SEQ ID NO: 49911 - DNA, 51 bp, Artificial Sequence; identical to SEQ ID NO: 1423
  Description of Artificial Sequence: Synthetic casein;  5' sequence and inner sequence

SEQ ID NO: 49912 - DNA, 53 bp, Artificial Sequence; identical to SEQ ID NO: 1437
  Description of Artificial Sequence: Synthetic casein;  5' sequence and inner sequence

SEQ ID NO: 49913 - DNA, 53 bp, Artificial Sequence; identical to SEQ ID NO: 45825
  Description of Artificial Sequence: Synthetic casein;  5' sequence and inner sequence

SEQ ID NO: 49914 - DNA, 53 bp, Artificial Sequence; identical to SEQ ID NO: 21269
  Description of Artificial Sequence: Synthetic casein;  5' sequence and inner sequence

SEQ ID NO: 49915 - DNA, 53 bp, Artificial Sequence; identical to SEQ ID NO: 5898
  Description of Artificial Sequence: Synthetic casein;  5' sequence and inner sequence

SEQ ID NO: 49916 - DNA, 53 bp, Artificial Sequence
  Description of Artificial Sequence: Synthetic casein;  5' sequence and inner sequence
tagggaagagaaggacatatgatggacgcaacgtaccgtatcgcggccatgtg

SEQ ID NO: 49917 - DNA, 53 bp, Artificial Sequence
  Description of Artificial Sequence: Synthetic casein;  5' sequence and inner sequence
tagggaagagaaggacatatgatggacgcaacgtaccgtatcgtgggcatgtg

SEQ ID NO: 49918 - DNA, 53 bp, Artificial Sequence; identical to SEQ ID NO: 45905
  Description of Artificial Sequence: Synthetic casein;  5' sequence and inner sequence

SEQ ID NO: 49919 - DNA, 53 bp, Artificial Sequence
  Description of Artificial Sequence: Synthetic casein;  5' sequence and inner sequence
tagggaagagaaggacatatgatggatgcaacgtaccgtatcgtggccatgtg

SEQ ID NO: 49920 - DNA, 53 bp, Artificial Sequence; identical to SEQ ID NO: 1080
  Description of Artificial Sequence: Synthetic casein;  5' sequence and inner sequence

SEQ ID NO: 49921 - DNA, 53 bp, Artificial Sequence
  Description of Artificial Sequence: Synthetic casein;  5' sequence and inner sequence
tagggaagagaaggacatatgatggacacaacgtaccgtatcgtggccatgtg

SEQ ID NO: 49922 - DNA, 53 bp, Artificial Sequence; identical to SEQ ID NO: 45993
  Description of Artificial Sequence: Synthetic casein;  5' sequence and inner sequence

SEQ ID NO: 49923 - DNA, 53 bp, Artificial Sequence
  Description of Artificial Sequence: Synthetic casein;  5' sequence and inner sequence
tagggaagagaaggacatatgatcgtgacacggtacgcatcgtatgtgtgatg

SEQ ID NO: 49924 - DNA, 53 bp, Artificial Sequence
  Description of Artificial Sequence: Synthetic casein;  5' sequence and inner sequence
tagggaagagaaggacatatgatgacgtaacgcgttacggtgtcgcatgcacg

SEQ ID NO: 49925 - DNA, 53 bp, Artificial Sequence; identical to SEQ ID NO: 45737
  Description of Artificial Sequence: Synthetic casein;  5' sequence and inner sequence

SEQ ID NO: 49926 - DNA, 53 bp, Artificial Sequence; identical to SEQ ID NO: 1311
  Description of Artificial Sequence: Synthetic casein;  5' sequence and inner sequence

SEQ ID NO: 49927 - DNA, 53 bp, Artificial Sequence; identical to SEQ ID NO: 13996
  Description of Artificial Sequence: Synthetic casein;  5' sequence and inner sequence

SEQ ID NO: 49928 - DNA, 53 bp, Artificial Sequence
  Description of Artificial Sequence: Synthetic casein;  5' sequence and inner sequence
tagggaagagaaggacatatgatggccacagcgtaacgttcgagtggtacgta

SEQ ID NO: 49929 - DNA, 53 bp, Artificial Sequence; identical to SEQ ID NO: 45650
  Description of Artificial Sequence: Synthetic casein;  5' sequence and inner sequence

SEQ ID NO: 49930 - DNA, 53 bp, Artificial Sequence; identical to SEQ ID NO: 29830
  Description of Artificial Sequence: Synthetic casein;  5' sequence and inner sequence

SEQ ID NO: 49931 - DNA, 53 bp, Artificial Sequence
  Description of Artificial Sequence: Synthetic casein;  5' sequence and inner sequence
tagggaagagaaggacatatgatgcacacggtacgtacggcacgatatgcgcg

SEQ ID NO: 49932 - DNA, 53 bp, Artificial Sequence
  Description of Artificial Sequence: Synthetic casein;  5' sequence and inner sequence
tagggaagagaaggacatatgatgcacgactcgcaccctatcatgaggccata

SEQ ID NO: 49933 - DNA, 53 bp, Artificial Sequence
  Description of Artificial Sequence: Synthetic casein;  5' sequence and inner sequence
tagggaagagaaggacatatgatcacgcaatgacgtgtgagcatgacgtcgcg

SEQ ID NO: 49934 - DNA, 53 bp, Artificial Sequence; identical to SEQ ID NO: 29674
  Description of Artificial Sequence: Synthetic casein;  5' sequence and inner sequence

SEQ ID NO: 49935 - DNA, 53 bp, Artificial Sequence; identical to SEQ ID NO: 17627
  Description of Artificial Sequence: Synthetic casein;  5' sequence and inner sequence

SEQ ID NO: 49936 - DNA, 53 bp, Artificial Sequence; identical to SEQ ID NO: 1365
  Description of Artificial Sequence: Synthetic casein;  5' sequence and inner sequence

SEQ ID NO: 49937 - DNA, 53 bp, Artificial Sequence; identical to SEQ ID NO: 21787
  Description of Artificial Sequence: Synthetic casein;  5' sequence and inner sequence

SEQ ID NO: 49938 - DNA, 53 bp, Artificial Sequence
  Description of Artificial Sequence: Synthetic casein;  5' sequence and inner sequence
tagggaagagaaggacatatgatcgatacgcgtcacgatacgtagcatgcgca

SEQ ID NO: 49939 - DNA, 53 bp, Artificial Sequence
  Description of Artificial Sequence: Synthetic casein;  5' sequence and inner sequence
tagggaagagaaggacatatgatcgacacgatgcatgcgtaccgtctgcacca

SEQ ID NO: 49940 - DNA, 53 bp, Artificial Sequence; identical to SEQ ID NO: 21964
  Description of Artificial Sequence: Synthetic casein;  5' sequence and inner sequence

SEQ ID NO: 49941 - DNA, 53 bp, Artificial Sequence; identical to SEQ ID NO: 21708
  Description of Artificial Sequence: Synthetic casein;  5' sequence and inner sequence

SEQ ID NO: 49942 - DNA, 52 bp, Artificial Sequence; identical to SEQ ID NO: 1193
  Description of Artificial Sequence: Synthetic casein;  5' sequence and inner sequence

SEQ ID NO: 49943 - DNA, 53 bp, Artificial Sequence; identical to SEQ ID NO: 33379
  Description of Artificial Sequence: Synthetic casein;  5' sequence and inner sequence

SEQ ID NO: 49944 - DNA, 53 bp, Artificial Sequence
  Description of Artificial Sequence: Synthetic casein;  5' sequence and inner sequence
tagggaagagaaggacatatgatcgtcacgcaaggagggacatgtgcttcgcg

SEQ ID NO: 49945 - DNA, 51 bp, Artificial Sequence
  Description of Artificial Sequence: Synthetic casein;  5' sequence and inner sequence
tagggaagagaaggacatatgatggacgcaacgtaacgtatcgtggccatg

SEQ ID NO: 49946 - DNA, 53 bp, Artificial Sequence
  Description of Artificial Sequence: Synthetic casein;  5' sequence and inner sequence
tagggaagagaaggacatatgatgcgatcgcaacgcaacgtgtgtacgtatcg

SEQ ID NO: 49947 - DNA, 53 bp, Artificial Sequence
  Description of Artificial Sequence: Synthetic casein;  5' sequence and inner sequence
tagggaagagaaggacatatgatgcacgtcacgccctgatgtgtcacggcaca

SEQ ID NO: 49948 - DNA, 53 bp, Artificial Sequence; identical to SEQ ID NO: 45583
  Description of Artificial Sequence: Synthetic casein;  5' sequence and inner sequence

SEQ ID NO: 49949 - DNA, 53 bp, Artificial Sequence; identical to SEQ ID NO: 45918
  Description of Artificial Sequence: Synthetic casein;  5' sequence and inner sequence

SEQ ID NO: 49950 - DNA, 53 bp, Artificial Sequence
  Description of Artificial Sequence: Synthetic casein;  5' sequence and inner sequence
tagggaagagaaggacatatgattcacgactcgcaccctatcatgtaggcatg

SEQ ID NO: 49951 - DNA, 53 bp, Artificial Sequence; identical to SEQ ID NO: 21475
  Description of Artificial Sequence: Synthetic casein;  5' sequence and inner sequence

SEQ ID NO: 49952 - DNA, 53 bp, Artificial Sequence; identical to SEQ ID NO: 45864
  Description of Artificial Sequence: Synthetic casein;  5' sequence and inner sequence

SEQ ID NO: 49953 - DNA, 53 bp, Artificial Sequence
  Description of Artificial Sequence: Synthetic casein;  5' sequence and inner sequence
tagggaagagaaggacatatgatcatgcgcagtgacgtacgtgcatgttcatg

SEQ ID NO: 49954 - DNA, 53 bp, Artificial Sequence
  Description of Artificial Sequence: Synthetic casein;  5' sequence and inner sequence
tagggaagagaaggacatatgatggccacaacgtacctcaacgtggacgtgca

SEQ ID NO: 49955 - DNA, 53 bp, Artificial Sequence; identical to SEQ ID NO: 21691
  Description of Artificial Sequence: Synthetic casein;  5' sequence and inner sequence

SEQ ID NO: 49956 - DNA, 51 bp, Artificial Sequence
  Description of Artificial Sequence: Synthetic casein;  5' sequence and inner sequence
tagggaagagaaggacatatgatggactcaacgtaccgtatcgtggccatg

SEQ ID NO: 49957 - DNA, 53 bp, Artificial Sequence; identical to SEQ ID NO: 33802
  Description of Artificial Sequence: Synthetic casein;  5' sequence and inner sequence

SEQ ID NO: 49958 - DNA, 53 bp, Artificial Sequence; identical to SEQ ID NO: 1203
  Description of Artificial Sequence: Synthetic casein;  5' sequence and inner sequence

SEQ ID NO: 49959 - DNA, 53 bp, Artificial Sequence
  Description of Artificial Sequence: Synthetic casein;  5' sequence and inner sequence
tagggaagagaaggacatatgatcgtgacgacgtagtgtcctgtcgcatcacg

SEQ ID NO: 49960 - DNA, 53 bp, Artificial Sequence
  Description of Artificial Sequence: Synthetic casein;  5' sequence and inner sequence
tagggaagagaaggacatatgatcgacaccacgctacgtcacgttacggcaca

SEQ ID NO: 49961 - DNA, 53 bp, Artificial Sequence
  Description of Artificial Sequence: Synthetic casein;  5' sequence and inner sequence
tagggaagagaaggacatatgatccatgcatcgtaacgcatcgtaccggcacg

SEQ ID NO: 49962 - DNA, 53 bp, Artificial Sequence; identical to SEQ ID NO: 45975
  Description of Artificial Sequence: Synthetic casein;  5' sequence and inner sequence

SEQ ID NO: 49963 - DNA, 53 bp, Artificial Sequence; identical to SEQ ID NO: 1449
  Description of Artificial Sequence: Synthetic casein;  5' sequence and inner sequence

SEQ ID NO: 49964 - DNA, 53 bp, Artificial Sequence
  Description of Artificial Sequence: Synthetic casein;  5' sequence and inner sequence
tagggaagagaaggacatatgatggacgcaacgtaccgcatcgtggccatgcg

SEQ ID NO: 49965 - DNA, 53 bp, Artificial Sequence; identical to SEQ ID NO: 45804
  Description of Artificial Sequence: Synthetic casein;  5' sequence and inner sequence

SEQ ID NO: 49966 - DNA, 53 bp, Artificial Sequence
  Description of Artificial Sequence: Synthetic casein;  5' sequence and inner sequence
tagggaagagaaggacatatgatcgatacgcgtaaggcaatgcgtactgcacg

SEQ ID NO: 49967 - DNA, 53 bp, Artificial Sequence; identical to SEQ ID NO: 1178
  Description of Artificial Sequence: Synthetic casein;  5' sequence and inner sequence

SEQ ID NO: 49968 - DNA, 53 bp, Artificial Sequence
  Description of Artificial Sequence: Synthetic casein;  5' sequence and inner sequence
tagggaagagaaggacatatgatgcgtcacggaccgtacgttgtcactgcgta

SEQ ID NO: 49969 - DNA, 53 bp, Artificial Sequence; identical to SEQ ID NO: 29574
  Description of Artificial Sequence: Synthetic casein;  5' sequence and inner sequence

SEQ ID NO: 49970 - DNA, 51 bp, Artificial Sequence
  Description of Artificial Sequence: Synthetic casein;  5' sequence and inner sequence
tagggaagagaaggacatatgatggacgcaccgtaccgtatcgtggccatg

SEQ ID NO: 49971 - DNA, 53 bp, Artificial Sequence; identical to SEQ ID NO: 1024
  Description of Artificial Sequence: Synthetic casein;  5' sequence and inner sequence

SEQ ID NO: 49972 - DNA, 53 bp, Artificial Sequence; identical to SEQ ID NO: 45883
  Description of Artificial Sequence: Synthetic casein;  5' sequence and inner sequence

SEQ ID NO: 49973 - DNA, 53 bp, Artificial Sequence; identical to SEQ ID NO: 17555
  Description of Artificial Sequence: Synthetic casein;  5' sequence and inner sequence

SEQ ID NO: 49974 - DNA, 53 bp, Artificial Sequence
  Description of Artificial Sequence: Synthetic casein;  5' sequence and inner sequence
tagggaagagaaggacatatgatacgcatcacacgtgtcgtacgtacctcgcg

SEQ ID NO: 49975 - DNA, 53 bp, Artificial Sequence; identical to SEQ ID NO: 1756
  Description of Artificial Sequence: Synthetic casein;  5' sequence and inner sequence

SEQ ID NO: 49976 - DNA, 53 bp, Artificial Sequence
  Description of Artificial Sequence: Synthetic casein;  5' sequence and inner sequence
tagggaagagaaggacatatgatgcgtcacgatgatgcgacacggcatgcaca

SEQ ID NO: 49977 - DNA, 53 bp, Artificial Sequence; identical to SEQ ID NO: 21662
  Description of Artificial Sequence: Synthetic casein;  5' sequence and inner sequence

SEQ ID NO: 49978 - DNA, 53 bp, Artificial Sequence
  Description of Artificial Sequence: Synthetic casein;  5' sequence and inner sequence
tagggaagagaaggacatatgatgcatcgcagcgttacgcactcgacgtgaca

SEQ ID NO: 49979 - DNA, 53 bp, Artificial Sequence
  Description of Artificial Sequence: Synthetic casein;  5' sequence and inner sequence
tagggaagagaaggacatatgatgcgtgtagcgtcagtgcatgcgatgacacg

SEQ ID NO: 49980 - DNA, 53 bp, Artificial Sequence; identical to SEQ ID NO: 21801
  Description of Artificial Sequence: Synthetic casein;  5' sequence and inner sequence

SEQ ID NO: 49981 - DNA, 53 bp, Artificial Sequence
  Description of Artificial Sequence: Synthetic casein;  5' sequence and inner sequence
tagggaagagaaggacatatgatggacgcagcgtaacgttcgaggggtacgta

SEQ ID NO: 49982 - DNA, 53 bp, Artificial Sequence
  Description of Artificial Sequence: Synthetic casein;  5' sequence and inner sequence
tagggaagagaaggacatatgatgcggcacgacgtaacggacacgacgtcacg

SEQ ID NO: 49983 - DNA, 53 bp, Artificial Sequence
  Description of Artificial Sequence: Synthetic casein;  5' sequence and inner sequence
tagggaagagaaggacatatgatggcatgcgaggaacgaggcatgatgcgtca

SEQ ID NO: 49984 - DNA, 53 bp, Artificial Sequence; identical to SEQ ID NO: 45994
  Description of Artificial Sequence: Synthetic casein;  5' sequence and inner sequence

SEQ ID NO: 49985 - DNA, 53 bp, Artificial Sequence
  Description of Artificial Sequence: Synthetic casein;  5' sequence and inner sequence
tagggaagagaaggacatatgatgcgatgcacgtaggtggccttgtcgtcacg

SEQ ID NO: 49986 - DNA, 53 bp, Artificial Sequence; identical to SEQ ID NO: 45971
  Description of Artificial Sequence: Synthetic casein;  5' sequence and inner sequence

SEQ ID NO: 49987 - DNA, 53 bp, Artificial Sequence; identical to SEQ ID NO: 1821
  Description of Artificial Sequence: Synthetic casein;  5' sequence and inner sequence

SEQ ID NO: 49988 - DNA, 53 bp, Artificial Sequence; identical to SEQ ID NO: 45923
  Description of Artificial Sequence: Synthetic casein;  5' sequence and inner sequence

SEQ ID NO: 49989 - DNA, 53 bp, Artificial Sequence; identical to SEQ ID NO: 1154
  Description of Artificial Sequence: Synthetic casein;  5' sequence and inner sequence

SEQ ID NO: 49990 - DNA, 53 bp, Artificial Sequence; identical to SEQ ID NO: 45837
  Description of Artificial Sequence: Synthetic casein;  5' sequence and inner sequence

SEQ ID NO: 49991 - DNA, 54 bp, Artificial Sequence
  Description of Artificial Sequence: Synthetic casein;  5' sequence and inner sequence
tagggaagagaaggacatatgatcacgtgtcaacgtgcattacgtcgtgacgcg

SEQ ID NO: 49992 - DNA, 53 bp, Artificial Sequence
  Description of Artificial Sequence: Synthetic casein;  5' sequence and inner sequence
tagggaagagaaggacatatgatgcacgatgcaacgcgtgtcctcgcgtcacg

SEQ ID NO: 49993 - DNA, 53 bp, Artificial Sequence
  Description of Artificial Sequence: Synthetic casein;  5' sequence and inner sequence
tagggaagagaaggacatatgatggacgcaacgtaccgtatcgtggccacgta

SEQ ID NO: 49994 - DNA, 53 bp, Artificial Sequence
  Description of Artificial Sequence: Synthetic casein;  5' sequence and inner sequence
tagggaagagaaggacatatgatgcacatgcgacagtacgtacgtatcgcacc

SEQ ID NO: 49995 - DNA, 53 bp, Artificial Sequence
  Description of Artificial Sequence: Synthetic casein;  5' sequence and inner sequence
tagggaagagaaggacatatgatacgtacacgtaaggcatcacgtacttcgca

SEQ ID NO: 49996 - DNA, 53 bp, Artificial Sequence
  Description of Artificial Sequence: Synthetic casein;  5' sequence and inner sequence
tagggaagagaaggacatatgatgtcacgcacgaacactatcatggcggcatg

SEQ ID NO: 49997 - DNA, 53 bp, Artificial Sequence
  Description of Artificial Sequence: Synthetic casein;  5' sequence and inner sequence
tagggaagagaaggacatatgatcacgtcacatgcacgacgattcgcgtggtg

SEQ ID NO: 49998 - DNA, 53 bp, Artificial Sequence; identical to SEQ ID NO: 1531
  Description of Artificial Sequence: Synthetic casein;  5' sequence and inner sequence

SEQ ID NO: 49999 - DNA, 53 bp, Artificial Sequence; identical to SEQ ID NO: 1903
  Description of Artificial Sequence: Synthetic casein;  5' sequence and inner sequence

SEQ ID NO: 50000 - DNA, 53 bp, Artificial Sequence
  Description of Artificial Sequence: Synthetic casein;  5' sequence and inner sequence
tagggaagagaaggacatatgatcgtgacgcgacgtgacgacatagctgcgtg

SEQ ID NO: 50001 - DNA, 53 bp, Artificial Sequence
  Description of Artificial Sequence: Synthetic casein;  5' sequence and inner sequence
tagggaagagaaggacatatgatgcgttacgtgcatcaggccatcacgttgcc

SEQ ID NO: 50002 - DNA, 51 bp, Artificial Sequence
  Description of Artificial Sequence: Synthetic casein;  5' sequence and inner sequence
tagggaagagaaggacatatgatgcaacgcacgacacgatgtcacgtcgcg

SEQ ID NO: 50003 - DNA, 53 bp, Artificial Sequence; identical to SEQ ID NO: 2004
  Description of Artificial Sequence: Synthetic casein; inner sequence and 3' sequence

SEQ ID NO: 50004 - DNA, 53 bp, Artificial Sequence; identical to SEQ ID NO: 2003
  Description of Artificial Sequence: Synthetic casein; inner sequence and 3' sequence

SEQ ID NO: 50005 - DNA, 53 bp, Artificial Sequence; identical to SEQ ID NO: 2021
  Description of Artificial Sequence: Synthetic casein; inner sequence and 3' sequence

SEQ ID NO: 50006 - DNA, 53 bp, Artificial Sequence; identical to SEQ ID NO: 2006
  Description of Artificial Sequence: Synthetic casein; inner sequence and 3' sequence

SEQ ID NO: 50007 - DNA, 53 bp, Artificial Sequence; identical to SEQ ID NO: 2052
  Description of Artificial Sequence: Synthetic casein; inner sequence and 3' sequence

SEQ ID NO: 50008 - DNA, 53 bp, Artificial Sequence; identical to SEQ ID NO: 2010
  Description of Artificial Sequence: Synthetic casein; inner sequence and 3' sequence

SEQ ID NO: 50009 - DNA, 53 bp, Artificial Sequence; identical to SEQ ID NO: 2020
  Description of Artificial Sequence: Synthetic casein; inner sequence and 3' sequence

SEQ ID NO: 50010 - DNA, 53 bp, Artificial Sequence; identical to SEQ ID NO: 2005
  Description of Artificial Sequence: Synthetic casein; inner sequence and 3' sequence

SEQ ID NO: 50011 - DNA, 53 bp, Artificial Sequence; identical to SEQ ID NO: 2008
  Description of Artificial Sequence: Synthetic casein; inner sequence and 3' sequence

SEQ ID NO: 50012 - DNA, 53 bp, Artificial Sequence; identical to SEQ ID NO: 2007
  Description of Artificial Sequence: Synthetic casein; inner sequence and 3' sequence

SEQ ID NO: 50013 - DNA, 53 bp, Artificial Sequence; identical to SEQ ID NO: 2081
  Description of Artificial Sequence: Synthetic casein; inner sequence and 3' sequence

SEQ ID NO: 50014 - DNA, 53 bp, Artificial Sequence; identical to SEQ ID NO: 2011
  Description of Artificial Sequence: Synthetic casein; inner sequence and 3' sequence

SEQ ID NO: 50015 - DNA, 51 bp, Artificial Sequence; identical to SEQ ID NO: 2241
  Description of Artificial Sequence: Synthetic casein; inner sequence and 3' sequence

SEQ ID NO: 50016 - DNA, 53 bp, Artificial Sequence; identical to SEQ ID NO: 2201
  Description of Artificial Sequence: Synthetic casein; inner sequence and 3' sequence

SEQ ID NO: 50017 - DNA, 53 bp, Artificial Sequence; identical to SEQ ID NO: 2033
  Description of Artificial Sequence: Synthetic casein; inner sequence and 3' sequence

SEQ ID NO: 50018 - DNA, 53 bp, Artificial Sequence; identical to SEQ ID NO: 2030
  Description of Artificial Sequence: Synthetic casein; inner sequence and 3' sequence

SEQ ID NO: 50019 - DNA, 53 bp, Artificial Sequence; identical to SEQ ID NO: 2220
  Description of Artificial Sequence: Synthetic casein; inner sequence and 3' sequence

SEQ ID NO: 50020 - DNA, 53 bp, Artificial Sequence; identical to SEQ ID NO: 2040
  Description of Artificial Sequence: Synthetic casein; inner sequence and 3' sequence

SEQ ID NO: 50021 - DNA, 53 bp, Artificial Sequence; identical to SEQ ID NO: 2009
  Description of Artificial Sequence: Synthetic casein; inner sequence and 3' sequence

SEQ ID NO: 50022 - DNA, 53 bp, Artificial Sequence; identical to SEQ ID NO: 2023
  Description of Artificial Sequence: Synthetic casein; inner sequence and 3' sequence

SEQ ID NO: 50023 - DNA, 53 bp, Artificial Sequence; identical to SEQ ID NO: 2046
  Description of Artificial Sequence: Synthetic casein; inner sequence and 3' sequence

SEQ ID NO: 50024 - DNA, 53 bp, Artificial Sequence; identical to SEQ ID NO: 2279
  Description of Artificial Sequence: Synthetic casein; inner sequence and 3' sequence

SEQ ID NO: 50025 - DNA, 53 bp, Artificial Sequence; identical to SEQ ID NO: 18640
  Description of Artificial Sequence: Synthetic casein; inner sequence and 3' sequence

SEQ ID NO: 50026 - DNA, 53 bp, Artificial Sequence; identical to SEQ ID NO: 2028
  Description of Artificial Sequence: Synthetic casein; inner sequence and 3' sequence

SEQ ID NO: 50027 - DNA, 53 bp, Artificial Sequence; identical to SEQ ID NO: 2078
  Description of Artificial Sequence: Synthetic casein; inner sequence and 3' sequence

SEQ ID NO: 50028 - DNA, 53 bp, Artificial Sequence; identical to SEQ ID NO: 2012
  Description of Artificial Sequence: Synthetic casein; inner sequence and 3' sequence

SEQ ID NO: 50029 - DNA, 53 bp, Artificial Sequence; identical to SEQ ID NO: 2014
  Description of Artificial Sequence: Synthetic casein; inner sequence and 3' sequence

SEQ ID NO: 50030 - DNA, 53 bp, Artificial Sequence; identical to SEQ ID NO: 2036
  Description of Artificial Sequence: Synthetic casein; inner sequence and 3' sequence

SEQ ID NO: 50031 - DNA, 53 bp, Artificial Sequence; identical to SEQ ID NO: 2079
  Description of Artificial Sequence: Synthetic casein; inner sequence and 3' sequence

SEQ ID NO: 50032 - DNA, 53 bp, Artificial Sequence; identical to SEQ ID NO: 30278
  Description of Artificial Sequence: Synthetic casein; inner sequence and 3' sequence

SEQ ID NO: 50033 - DNA, 53 bp, Artificial Sequence; identical to SEQ ID NO: 2041
  Description of Artificial Sequence: Synthetic casein; inner sequence and 3' sequence

SEQ ID NO: 50034 - DNA, 53 bp, Artificial Sequence; identical to SEQ ID NO: 2526
  Description of Artificial Sequence: Synthetic casein; inner sequence and 3' sequence

SEQ ID NO: 50035 - DNA, 53 bp, Artificial Sequence; identical to SEQ ID NO: 2506
  Description of Artificial Sequence: Synthetic casein; inner sequence and 3' sequence

SEQ ID NO: 50036 - DNA, 53 bp, Artificial Sequence; identical to SEQ ID NO: 30199
  Description of Artificial Sequence: Synthetic casein; inner sequence and 3' sequence

SEQ ID NO: 50037 - DNA, 53 bp, Artificial Sequence; identical to SEQ ID NO: 2458
  Description of Artificial Sequence: Synthetic casein; inner sequence and 3' sequence

SEQ ID NO: 50038 - DNA, 53 bp, Artificial Sequence; identical to SEQ ID NO: 6659
  Description of Artificial Sequence: Synthetic casein; inner sequence and 3' sequence

SEQ ID NO: 50039 - DNA, 53 bp, Artificial Sequence; identical to SEQ ID NO: 30208
  Description of Artificial Sequence: Synthetic casein; inner sequence and 3' sequence

SEQ ID NO: 50040 - DNA, 53 bp, Artificial Sequence; identical to SEQ ID NO: 2108
  Description of Artificial Sequence: Synthetic casein; inner sequence and 3' sequence

SEQ ID NO: 50041 - DNA, 53 bp, Artificial Sequence; identical to SEQ ID NO: 2015
  Description of Artificial Sequence: Synthetic casein; inner sequence and 3' sequence

SEQ ID NO: 50042 - DNA, 53 bp, Artificial Sequence; identical to SEQ ID NO: 30252
  Description of Artificial Sequence: Synthetic casein; inner sequence and 3' sequence

SEQ ID NO: 50043 - DNA, 53 bp, Artificial Sequence; identical to SEQ ID NO: 22495
  Description of Artificial Sequence: Synthetic casein; inner sequence and 3' sequence

SEQ ID NO: 50044 - DNA, 53 bp, Artificial Sequence; identical to SEQ ID NO: 2381
  Description of Artificial Sequence: Synthetic casein; inner sequence and 3' sequence

SEQ ID NO: 50045 - DNA, 53 bp, Artificial Sequence; identical to SEQ ID NO: 2323
  Description of Artificial Sequence: Synthetic casein; inner sequence and 3' sequence

SEQ ID NO: 50046 - DNA, 53 bp, Artificial Sequence; identical to SEQ ID NO: 22468
  Description of Artificial Sequence: Synthetic casein; inner sequence and 3' sequence

SEQ ID NO: 50047 - DNA, 53 bp, Artificial Sequence; identical to SEQ ID NO: 2281
  Description of Artificial Sequence: Synthetic casein; inner sequence and 3' sequence

SEQ ID NO: 50048 - DNA, 52 bp, Artificial Sequence; identical to SEQ ID NO: 2070
  Description of Artificial Sequence: Synthetic casein; inner sequence and 3' sequence

SEQ ID NO: 50049 - DNA, 53 bp, Artificial Sequence; identical to SEQ ID NO: 2071
  Description of Artificial Sequence: Synthetic casein; inner sequence and 3' sequence

SEQ ID NO: 50050 - DNA, 53 bp, Artificial Sequence; identical to SEQ ID NO: 2013
  Description of Artificial Sequence: Synthetic casein; inner sequence and 3' sequence

SEQ ID NO: 50051 - DNA, 53 bp, Artificial Sequence; identical to SEQ ID NO: 18818
  Description of Artificial Sequence: Synthetic casein; inner sequence and 3' sequence

SEQ ID NO: 50052 - DNA, 54 bp, Artificial Sequence; identical to SEQ ID NO: 18373
  Description of Artificial Sequence: Synthetic casein; inner sequence and 3' sequence

SEQ ID NO: 50053 - DNA, 53 bp, Artificial Sequence; identical to SEQ ID NO: 2045
  Description of Artificial Sequence: Synthetic casein; inner sequence and 3' sequence

SEQ ID NO: 50054 - DNA, 53 bp, Artificial Sequence; identical to SEQ ID NO: 2121
  Description of Artificial Sequence: Synthetic casein; inner sequence and 3' sequence

SEQ ID NO: 50055 - DNA, 53 bp, Artificial Sequence; identical to SEQ ID NO: 30108
  Description of Artificial Sequence: Synthetic casein; inner sequence and 3' sequence

SEQ ID NO: 50056 - DNA, 53 bp, Artificial Sequence; identical to SEQ ID NO: 2359
  Description of Artificial Sequence: Synthetic casein; inner sequence and 3' sequence

SEQ ID NO: 50057 - DNA, 53 bp, Artificial Sequence; identical to SEQ ID NO: 22540
  Description of Artificial Sequence: Synthetic casein; inner sequence and 3' sequence

SEQ ID NO: 50058 - DNA, 53 bp, Artificial Sequence; identical to SEQ ID NO: 30436
  Description of Artificial Sequence: Synthetic casein; inner sequence and 3' sequence

SEQ ID NO: 50059 - DNA, 53 bp, Artificial Sequence; identical to SEQ ID NO: 22917
  Description of Artificial Sequence: Synthetic casein; inner sequence and 3' sequence

SEQ ID NO: 50060 - DNA, 53 bp, Artificial Sequence; identical to SEQ ID NO: 2491
  Description of Artificial Sequence: Synthetic casein; inner sequence and 3' sequence

SEQ ID NO: 50061 - DNA, 53 bp, Artificial Sequence; identical to SEQ ID NO: 46212
  Description of Artificial Sequence: Synthetic casein; inner sequence and 3' sequence

SEQ ID NO: 50062 - DNA, 52 bp, Artificial Sequence; identical to SEQ ID NO: 46164
  Description of Artificial Sequence: Synthetic casein; inner sequence and 3' sequence

SEQ ID NO: 50063 - DNA, 53 bp, Artificial Sequence; identical to SEQ ID NO: 2035
  Description of Artificial Sequence: Synthetic casein; inner sequence and 3' sequence

SEQ ID NO: 50064 - DNA, 53 bp, Artificial Sequence; identical to SEQ ID NO: 18266
  Description of Artificial Sequence: Synthetic casein; inner sequence and 3' sequence

SEQ ID NO: 50065 - DNA, 53 bp, Artificial Sequence; identical to SEQ ID NO: 2025
  Description of Artificial Sequence: Synthetic casein; inner sequence and 3' sequence

SEQ ID NO: 50066 - DNA, 53 bp, Artificial Sequence; identical to SEQ ID NO: 30526
  Description of Artificial Sequence: Synthetic casein; inner sequence and 3' sequence

SEQ ID NO: 50067 - DNA, 53 bp, Artificial Sequence; identical to SEQ ID NO: 2018
  Description of Artificial Sequence: Synthetic casein; inner sequence and 3' sequence

SEQ ID NO: 50068 - DNA, 53 bp, Artificial Sequence; identical to SEQ ID NO: 18837
  Description of Artificial Sequence: Synthetic casein; inner sequence and 3' sequence

SEQ ID NO: 50069 - DNA, 53 bp, Artificial Sequence; identical to SEQ ID NO: 2340
  Description of Artificial Sequence: Synthetic casein; inner sequence and 3' sequence

SEQ ID NO: 50070 - DNA, 53 bp, Artificial Sequence; identical to SEQ ID NO: 30477
  Description of Artificial Sequence: Synthetic casein; inner sequence and 3' sequence

SEQ ID NO: 50071 - DNA, 53 bp, Artificial Sequence; identical to SEQ ID NO: 2017
  Description of Artificial Sequence: Synthetic casein; inner sequence and 3' sequence

SEQ ID NO: 50072 - DNA, 53 bp, Artificial Sequence; identical to SEQ ID NO: 30699
  Description of Artificial Sequence: Synthetic casein; inner sequence and 3' sequence

SEQ ID NO: 50073 - DNA, 53 bp, Artificial Sequence; identical to SEQ ID NO: 22105
  Description of Artificial Sequence: Synthetic casein; inner sequence and 3' sequence

SEQ ID NO: 50074 - DNA, 53 bp, Artificial Sequence; identical to SEQ ID NO: 2746
  Description of Artificial Sequence: Synthetic casein; inner sequence and 3' sequence

SEQ ID NO: 50075 - DNA, 53 bp, Artificial Sequence; identical to SEQ ID NO: 46219
  Description of Artificial Sequence: Synthetic casein; inner sequence and 3' sequence

SEQ ID NO: 50076 - DNA, 53 bp, Artificial Sequence; identical to SEQ ID NO: 2039
  Description of Artificial Sequence: Synthetic casein; inner sequence and 3' sequence

SEQ ID NO: 50077 - DNA, 53 bp, Artificial Sequence; identical to SEQ ID NO: 30147
  Description of Artificial Sequence: Synthetic casein; inner sequence and 3' sequence

SEQ ID NO: 50078 - DNA, 53 bp, Artificial Sequence; identical to SEQ ID NO: 2053
  Description of Artificial Sequence: Synthetic casein; inner sequence and 3' sequence

SEQ ID NO: 50079 - DNA, 53 bp, Artificial Sequence; identical to SEQ ID NO: 30382
  Description of Artificial Sequence: Synthetic casein; inner sequence and 3' sequence

SEQ ID NO: 50080 - DNA, 53 bp, Artificial Sequence; identical to SEQ ID NO: 30320
  Description of Artificial Sequence: Synthetic casein; inner sequence and 3' sequence

SEQ ID NO: 50081 - DNA, 53 bp, Artificial Sequence; identical to SEQ ID NO: 2066
  Description of Artificial Sequence: Synthetic casein; inner sequence and 3' sequence

SEQ ID NO: 50082 - DNA, 53 bp, Artificial Sequence; identical to SEQ ID NO: 30381
  Description of Artificial Sequence: Synthetic casein; inner sequence and 3' sequence

SEQ ID NO: 50083 - DNA, 53 bp, Artificial Sequence; identical to SEQ ID NO: 30541
  Description of Artificial Sequence: Synthetic casein; inner sequence and 3' sequence

SEQ ID NO: 50084 - DNA, 53 bp, Artificial Sequence; identical to SEQ ID NO: 30751
  Description of Artificial Sequence: Synthetic casein; inner sequence and 3' sequence

SEQ ID NO: 50085 - DNA, 53 bp, Artificial Sequence; identical to SEQ ID NO: 30425
  Description of Artificial Sequence: Synthetic casein; inner sequence and 3' sequence

SEQ ID NO: 50086 - DNA, 54 bp, Artificial Sequence; identical to SEQ ID NO: 2971
  Description of Artificial Sequence: Synthetic casein; inner sequence and 3' sequence

SEQ ID NO: 50087 - DNA, 53 bp, Artificial Sequence; identical to SEQ ID NO: 2067
  Description of Artificial Sequence: Synthetic casein; inner sequence and 3' sequence

SEQ ID NO: 50088 - DNA, 53 bp, Artificial Sequence; identical to SEQ ID NO: 2174
  Description of Artificial Sequence: Synthetic casein; inner sequence and 3' sequence

SEQ ID NO: 50089 - DNA, 53 bp, Artificial Sequence; identical to SEQ ID NO: 18211
  Description of Artificial Sequence: Synthetic casein; inner sequence and 3' sequence

SEQ ID NO: 50090 - DNA, 53 bp, Artificial Sequence; identical to SEQ ID NO: 2517
  Description of Artificial Sequence: Synthetic casein; inner sequence and 3' sequence

SEQ ID NO: 50091 - DNA, 53 bp, Artificial Sequence; identical to SEQ ID NO: 2231
  Description of Artificial Sequence: Synthetic casein; inner sequence and 3' sequence

SEQ ID NO: 50092 - DNA, 53 bp, Artificial Sequence; identical to SEQ ID NO: 2063
  Description of Artificial Sequence: Synthetic casein; inner sequence and 3' sequence

SEQ ID NO: 50093 - DNA, 53 bp, Artificial Sequence; identical to SEQ ID NO: 6627
  Description of Artificial Sequence: Synthetic casein; inner sequence and 3' sequence

SEQ ID NO: 50094 - DNA, 53 bp, Artificial Sequence; identical to SEQ ID NO: 2054
  Description of Artificial Sequence: Synthetic casein; inner sequence and 3' sequence

SEQ ID NO: 50095 - DNA, 53 bp, Artificial Sequence; identical to SEQ ID NO: 30379
  Description of Artificial Sequence: Synthetic casein; inner sequence and 3' sequence

SEQ ID NO: 50096 - DNA, 53 bp, Artificial Sequence; identical to SEQ ID NO: 2442
  Description of Artificial Sequence: Synthetic casein; inner sequence and 3' sequence

SEQ ID NO: 50097 - DNA, 53 bp, Artificial Sequence; identical to SEQ ID NO: 2049
  Description of Artificial Sequence: Synthetic casein; inner sequence and 3' sequence

SEQ ID NO: 50098 - DNA, 53 bp, Artificial Sequence; identical to SEQ ID NO: 2145
  Description of Artificial Sequence: Synthetic casein; inner sequence and 3' sequence

SEQ ID NO: 50099 - DNA, 53 bp, Artificial Sequence; identical to SEQ ID NO: 2283
  Description of Artificial Sequence: Synthetic casein; inner sequence and 3' sequence

SEQ ID NO: 50100 - DNA, 47 bp, Artificial Sequence
  Description of Artificial Sequence: Synthetic casein; inner sequence and 3' sequence
gcgtcacggcatacgtactgcgcattgactagtacatgaccacttga

SEQ ID NO: 50101 - DNA, 53 bp, Artificial Sequence; identical to SEQ ID NO: 2184
  Description of Artificial Sequence: Synthetic casein; inner sequence and 3' sequence

SEQ ID NO: 50102 - DNA, 53 bp, Artificial Sequence; identical to SEQ ID NO: 30310
  Description of Artificial Sequence: Synthetic casein; inner sequence and 3' sequence

SEQ ID NO: 50103 - DNA, 53 bp, Artificial Sequence; identical to SEQ ID NO: 22524
  Description of Artificial Sequence: Synthetic casein; inner sequence and 3' sequence

SEQ ID NO: 50104 - DNA, 53 bp, Artificial Sequence; identical to SEQ ID NO: 2419
  Description of Artificial Sequence: Synthetic casein; inner sequence and 3' sequence

SEQ ID NO: 50105 - DNA, 53 bp, Artificial Sequence; identical to SEQ ID NO: 2059
  Description of Artificial Sequence: Synthetic casein; inner sequence and 3' sequence

SEQ ID NO: 50106 - DNA, 52 bp, Artificial Sequence; identical to SEQ ID NO: 30237
  Description of Artificial Sequence: Synthetic casein; inner sequence and 3' sequence

SEQ ID NO: 50107 - DNA, 53 bp, Artificial Sequence; identical to SEQ ID NO: 18634
  Description of Artificial Sequence: Synthetic casein; inner sequence and 3' sequence

SEQ ID NO: 50108 - DNA, 53 bp, Artificial Sequence; identical to SEQ ID NO: 2613
  Description of Artificial Sequence: Synthetic casein; inner sequence and 3' sequence

SEQ ID NO: 50109 - DNA, 53 bp, Artificial Sequence; identical to SEQ ID NO: 30985
  Description of Artificial Sequence: Synthetic casein; inner sequence and 3' sequence

SEQ ID NO: 50110 - DNA, 53 bp, Artificial Sequence; identical to SEQ ID NO: 2111
  Description of Artificial Sequence: Synthetic casein; inner sequence and 3' sequence

SEQ ID NO: 50111 - DNA, 53 bp, Artificial Sequence; identical to SEQ ID NO: 22486
  Description of Artificial Sequence: Synthetic casein; inner sequence and 3' sequence

SEQ ID NO: 50112 - DNA, 53 bp, Artificial Sequence; identical to SEQ ID NO: 14997
  Description of Artificial Sequence: Synthetic casein; inner sequence and 3' sequence

SEQ ID NO: 50113 - DNA, 53 bp, Artificial Sequence; identical to SEQ ID NO: 18603
  Description of Artificial Sequence: Synthetic casein; inner sequence and 3' sequence

SEQ ID NO: 50114 - DNA, 53 bp, Artificial Sequence; identical to SEQ ID NO: 2037
  Description of Artificial Sequence: Synthetic casein; inner sequence and 3' sequence

SEQ ID NO: 50115 - DNA, 53 bp, Artificial Sequence; identical to SEQ ID NO: 46321
  Description of Artificial Sequence: Synthetic casein; inner sequence and 3' sequence

SEQ ID NO: 50116 - DNA, 53 bp, Artificial Sequence; identical to SEQ ID NO: 30939
  Description of Artificial Sequence: Synthetic casein; inner sequence and 3' sequence

SEQ ID NO: 50117 - DNA, 53 bp, Artificial Sequence; identical to SEQ ID NO: 30243
  Description of Artificial Sequence: Synthetic casein; inner sequence and 3' sequence

SEQ ID NO: 50118 - DNA, 53 bp, Artificial Sequence; identical to SEQ ID NO: 6429
  Description of Artificial Sequence: Synthetic casein; inner sequence and 3' sequence

SEQ ID NO: 50119 - DNA, 53 bp, Artificial Sequence; identical to SEQ ID NO: 2212
  Description of Artificial Sequence: Synthetic casein; inner sequence and 3' sequence

SEQ ID NO: 50120 - DNA, 53 bp, Artificial Sequence; identical to SEQ ID NO: 2886
  Description of Artificial Sequence: Synthetic casein; inner sequence and 3' sequence

SEQ ID NO: 50121 - DNA, 53 bp, Artificial Sequence; identical to SEQ ID NO: 2687
  Description of Artificial Sequence: Synthetic casein; inner sequence and 3' sequence

SEQ ID NO: 50122 - DNA, 53 bp, Artificial Sequence; identical to SEQ ID NO: 46111
  Description of Artificial Sequence: Synthetic casein; inner sequence and 3' sequence

SEQ ID NO: 50123 - DNA, 53 bp, Artificial Sequence; identical to SEQ ID NO: 46742
  Description of Artificial Sequence: Synthetic casein; inner sequence and 3' sequence

SEQ ID NO: 50124 - DNA, 53 bp, Artificial Sequence; identical to SEQ ID NO: 46753
  Description of Artificial Sequence: Synthetic casein; inner sequence and 3' sequence

SEQ ID NO: 50125 - DNA, 53 bp, Artificial Sequence; identical to SEQ ID NO: 2123
  Description of Artificial Sequence: Synthetic casein; inner sequence and 3' sequence

SEQ ID NO: 50126 - DNA, 53 bp, Artificial Sequence; identical to SEQ ID NO: 30221
  Description of Artificial Sequence: Synthetic casein; inner sequence and 3' sequence

SEQ ID NO: 50127 - DNA, 53 bp, Artificial Sequence; identical to SEQ ID NO: 2243
  Description of Artificial Sequence: Synthetic casein; inner sequence and 3' sequence

SEQ ID NO: 50128 - DNA, 53 bp, Artificial Sequence; identical to SEQ ID NO: 30743
  Description of Artificial Sequence: Synthetic casein; inner sequence and 3' sequence

SEQ ID NO: 50129 - DNA, 53 bp, Artificial Sequence; identical to SEQ ID NO: 2172
  Description of Artificial Sequence: Synthetic casein; inner sequence and 3' sequence

SEQ ID NO: 50130 - DNA, 53 bp, Artificial Sequence; identical to SEQ ID NO: 46446
  Description of Artificial Sequence: Synthetic casein; inner sequence and 3' sequence

SEQ ID NO: 50131 - DNA, 53 bp, Artificial Sequence; identical to SEQ ID NO: 22473
  Description of Artificial Sequence: Synthetic casein; inner sequence and 3' sequence

SEQ ID NO: 50132 - DNA, 53 bp, Artificial Sequence; identical to SEQ ID NO: 46216
  Description of Artificial Sequence: Synthetic casein; inner sequence and 3' sequence

SEQ ID NO: 50133 - DNA, 53 bp, Artificial Sequence; identical to SEQ ID NO: 2414
  Description of Artificial Sequence: Synthetic casein; inner sequence and 3' sequence

SEQ ID NO: 50134 - DNA, 53 bp, Artificial Sequence; identical to SEQ ID NO: 2622
  Description of Artificial Sequence: Synthetic casein; inner sequence and 3' sequence

SEQ ID NO: 50135 - DNA, 53 bp, Artificial Sequence; identical to SEQ ID NO: 46623
  Description of Artificial Sequence: Synthetic casein; inner sequence and 3' sequence

SEQ ID NO: 50136 - DNA, 53 bp, Artificial Sequence; identical to SEQ ID NO: 18859
  Description of Artificial Sequence: Synthetic casein; inner sequence and 3' sequence

SEQ ID NO: 50137 - DNA, 53 bp, Artificial Sequence; identical to SEQ ID NO: 6289
  Description of Artificial Sequence: Synthetic casein; inner sequence and 3' sequence

SEQ ID NO: 50138 - DNA, 53 bp, Artificial Sequence
  Description of Artificial Sequence: Synthetic casein; inner sequence and 3' sequence
gcgacgtggcgcaacggatggacgtacgcattgactagtacatgaccacttga

SEQ ID NO: 50139 - DNA, 53 bp, Artificial Sequence; identical to SEQ ID NO: 2684
  Description of Artificial Sequence: Synthetic casein; inner sequence and 3' sequence

SEQ ID NO: 50140 - DNA, 53 bp, Artificial Sequence; identical to SEQ ID NO: 46245
  Description of Artificial Sequence: Synthetic casein; inner sequence and 3' sequence

SEQ ID NO: 50141 - DNA, 53 bp, Artificial Sequence; identical to SEQ ID NO: 2379
  Description of Artificial Sequence: Synthetic casein; inner sequence and 3' sequence

SEQ ID NO: 50142 - DNA, 53 bp, Artificial Sequence; identical to SEQ ID NO: 2138
  Description of Artificial Sequence: Synthetic casein; inner sequence and 3' sequence

SEQ ID NO: 50143 - DNA, 53 bp, Artificial Sequence; identical to SEQ ID NO: 2611
  Description of Artificial Sequence: Synthetic casein; inner sequence and 3' sequence

SEQ ID NO: 50144 - DNA, 53 bp, Artificial Sequence; identical to SEQ ID NO: 30782
  Description of Artificial Sequence: Synthetic casein; inner sequence and 3' sequence

SEQ ID NO: 50145 - DNA, 53 bp, Artificial Sequence; identical to SEQ ID NO: 30195
  Description of Artificial Sequence: Synthetic casein; inner sequence and 3' sequence

SEQ ID NO: 50146 - DNA, 53 bp, Artificial Sequence; identical to SEQ ID NO: 2467
  Description of Artificial Sequence: Synthetic casein; inner sequence and 3' sequence

SEQ ID NO: 50147 - DNA, 53 bp, Artificial Sequence; identical to SEQ ID NO: 46900
  Description of Artificial Sequence: Synthetic casein; inner sequence and 3' sequence

SEQ ID NO: 50148 - DNA, 53 bp, Artificial Sequence; identical to SEQ ID NO: 30907
  Description of Artificial Sequence: Synthetic casein; inner sequence and 3' sequence

SEQ ID NO: 50149 - DNA, 53 bp, Artificial Sequence; identical to SEQ ID NO: 2343
  Description of Artificial Sequence: Synthetic casein; inner sequence and 3' sequence

SEQ ID NO: 50150 - DNA, 53 bp, Artificial Sequence; identical to SEQ ID NO: 46951
  Description of Artificial Sequence: Synthetic casein; inner sequence and 3' sequence

SEQ ID NO: 50151 - DNA, 53 bp, Artificial Sequence; identical to SEQ ID NO: 22151
  Description of Artificial Sequence: Synthetic casein; inner sequence and 3' sequence

SEQ ID NO: 50152 - DNA, 53 bp, Artificial Sequence; identical to SEQ ID NO: 30497
  Description of Artificial Sequence: Synthetic casein; inner sequence and 3' sequence

SEQ ID NO: 50153 - DNA, 53 bp, Artificial Sequence; identical to SEQ ID NO: 30233
  Description of Artificial Sequence: Synthetic casein; inner sequence and 3' sequence

SEQ ID NO: 50154 - DNA, 53 bp, Artificial Sequence; identical to SEQ ID NO: 2194
  Description of Artificial Sequence: Synthetic casein; inner sequence and 3' sequence

SEQ ID NO: 50155 - DNA, 53 bp, Artificial Sequence
  Description of Artificial Sequence: Synthetic casein; inner sequence and 3' sequence
gacgtgacgtgacggatggtgacgtacgcattgactagtacatgaccacttga

SEQ ID NO: 50156 - DNA, 53 bp, Artificial Sequence; identical to SEQ ID NO: 30400
  Description of Artificial Sequence: Synthetic casein; inner sequence and 3' sequence

SEQ ID NO: 50157 - DNA, 53 bp, Artificial Sequence; identical to SEQ ID NO: 46116
  Description of Artificial Sequence: Synthetic casein; inner sequence and 3' sequence

SEQ ID NO: 50158 - DNA, 53 bp, Artificial Sequence; identical to SEQ ID NO: 30335
  Description of Artificial Sequence: Synthetic casein; inner sequence and 3' sequence

SEQ ID NO: 50159 - DNA, 53 bp, Artificial Sequence; identical to SEQ ID NO: 2303
  Description of Artificial Sequence: Synthetic casein; inner sequence and 3' sequence

SEQ ID NO: 50160 - DNA, 53 bp, Artificial Sequence; identical to SEQ ID NO: 2073
  Description of Artificial Sequence: Synthetic casein; inner sequence and 3' sequence

SEQ ID NO: 50161 - DNA, 53 bp, Artificial Sequence; identical to SEQ ID NO: 46678
  Description of Artificial Sequence: Synthetic casein; inner sequence and 3' sequence

SEQ ID NO: 50162 - DNA, 53 bp, Artificial Sequence; identical to SEQ ID NO: 30869
  Description of Artificial Sequence: Synthetic casein; inner sequence and 3' sequence

SEQ ID NO: 50163 - DNA, 53 bp, Artificial Sequence; identical to SEQ ID NO: 2272
  Description of Artificial Sequence: Synthetic casein; inner sequence and 3' sequence

SEQ ID NO: 50164 - DNA, 53 bp, Artificial Sequence; identical to SEQ ID NO: 30471
  Description of Artificial Sequence: Synthetic casein; inner sequence and 3' sequence

SEQ ID NO: 50165 - DNA, 53 bp, Artificial Sequence; identical to SEQ ID NO: 46127
  Description of Artificial Sequence: Synthetic casein; inner sequence and 3' sequence

SEQ ID NO: 50166 - DNA, 53 bp, Artificial Sequence; identical to SEQ ID NO: 30720
  Description of Artificial Sequence: Synthetic casein; inner sequence and 3' sequence

SEQ ID NO: 50167 - DNA, 53 bp, Artificial Sequence; identical to SEQ ID NO: 6707
  Description of Artificial Sequence: Synthetic casein; inner sequence and 3' sequence

SEQ ID NO: 50168 - DNA, 53 bp, Artificial Sequence; identical to SEQ ID NO: 6521
  Description of Artificial Sequence: Synthetic casein; inner sequence and 3' sequence

SEQ ID NO: 50169 - DNA, 53 bp, Artificial Sequence; identical to SEQ ID NO: 6336
  Description of Artificial Sequence: Synthetic casein; inner sequence and 3' sequence

SEQ ID NO: 50170 - DNA, 53 bp, Artificial Sequence; identical to SEQ ID NO: 30682
  Description of Artificial Sequence: Synthetic casein; inner sequence and 3' sequence

SEQ ID NO: 50171 - DNA, 53 bp, Artificial Sequence; identical to SEQ ID NO: 2161
  Description of Artificial Sequence: Synthetic casein; inner sequence and 3' sequence

SEQ ID NO: 50172 - DNA, 53 bp, Artificial Sequence; identical to SEQ ID NO: 2457
  Description of Artificial Sequence: Synthetic casein; inner sequence and 3' sequence

SEQ ID NO: 50173 - DNA, 53 bp, Artificial Sequence; identical to SEQ ID NO: 22869
  Description of Artificial Sequence: Synthetic casein; inner sequence and 3' sequence

SEQ ID NO: 50174 - DNA, 53 bp, Artificial Sequence; identical to SEQ ID NO: 30760
  Description of Artificial Sequence: Synthetic casein; inner sequence and 3' sequence

SEQ ID NO: 50175 - DNA, 53 bp, Artificial Sequence; identical to SEQ ID NO: 30971
  Description of Artificial Sequence: Synthetic casein; inner sequence and 3' sequence

SEQ ID NO: 50176 - DNA, 53 bp, Artificial Sequence; identical to SEQ ID NO: 46140
  Description of Artificial Sequence: Synthetic casein; inner sequence and 3' sequence

SEQ ID NO: 50177 - DNA, 53 bp, Artificial Sequence; identical to SEQ ID NO: 2022
  Description of Artificial Sequence: Synthetic casein; inner sequence and 3' sequence

SEQ ID NO: 50178 - DNA, 53 bp, Artificial Sequence; identical to SEQ ID NO: 30995
  Description of Artificial Sequence: Synthetic casein; inner sequence and 3' sequence

SEQ ID NO: 50179 - DNA, 54 bp, Artificial Sequence; identical to SEQ ID NO: 46761
  Description of Artificial Sequence: Synthetic casein; inner sequence and 3' sequence

SEQ ID NO: 50180 - DNA, 53 bp, Artificial Sequence; identical to SEQ ID NO: 2828
  Description of Artificial Sequence: Synthetic casein; inner sequence and 3' sequence

SEQ ID NO: 50181 - DNA, 53 bp, Artificial Sequence; identical to SEQ ID NO: 22551
  Description of Artificial Sequence: Synthetic casein; inner sequence and 3' sequence

SEQ ID NO: 50182 - DNA, 53 bp, Artificial Sequence; identical to SEQ ID NO: 30839
  Description of Artificial Sequence: Synthetic casein; inner sequence and 3' sequence

SEQ ID NO: 50183 - DNA, 53 bp, Artificial Sequence; identical to SEQ ID NO: 2617
  Description of Artificial Sequence: Synthetic casein; inner sequence and 3' sequence

SEQ ID NO: 50184 - DNA, 53 bp, Artificial Sequence; identical to SEQ ID NO: 46318
  Description of Artificial Sequence: Synthetic casein; inner sequence and 3' sequence

SEQ ID NO: 50185 - DNA, 53 bp, Artificial Sequence; identical to SEQ ID NO: 22504
  Description of Artificial Sequence: Synthetic casein; inner sequence and 3' sequence

SEQ ID NO: 50186 - DNA, 53 bp, Artificial Sequence; identical to SEQ ID NO: 2267
  Description of Artificial Sequence: Synthetic casein; inner sequence and 3' sequence

SEQ ID NO: 50187 - DNA, 53 bp, Artificial Sequence; identical to SEQ ID NO: 2727
  Description of Artificial Sequence: Synthetic casein; inner sequence and 3' sequence

SEQ ID NO: 50188 - DNA, 53 bp, Artificial Sequence; identical to SEQ ID NO: 46112
  Description of Artificial Sequence: Synthetic casein; inner sequence and 3' sequence

SEQ ID NO: 50189 - DNA, 53 bp, Artificial Sequence; identical to SEQ ID NO: 46227
  Description of Artificial Sequence: Synthetic casein; inner sequence and 3' sequence

SEQ ID NO: 50190 - DNA, 53 bp, Artificial Sequence; identical to SEQ ID NO: 46542
  Description of Artificial Sequence: Synthetic casein; inner sequence and 3' sequence

SEQ ID NO: 50191 - DNA, 48 bp, Artificial Sequence; identical to SEQ ID NO: 18927
  Description of Artificial Sequence: Synthetic casein; inner sequence and 3' sequence

SEQ ID NO: 50192 - DNA, 53 bp, Artificial Sequence; identical to SEQ ID NO: 46297
  Description of Artificial Sequence: Synthetic casein; inner sequence and 3' sequence

SEQ ID NO: 50193 - DNA, 53 bp, Artificial Sequence; identical to SEQ ID NO: 30557
  Description of Artificial Sequence: Synthetic casein; inner sequence and 3' sequence

SEQ ID NO: 50194 - DNA, 53 bp, Artificial Sequence; identical to SEQ ID NO: 18531
  Description of Artificial Sequence: Synthetic casein; inner sequence and 3' sequence

SEQ ID NO: 50195 - DNA, 53 bp, Artificial Sequence; identical to SEQ ID NO: 2077
  Description of Artificial Sequence: Synthetic casein; inner sequence and 3' sequence

SEQ ID NO: 50196 - DNA, 53 bp, Artificial Sequence; identical to SEQ ID NO: 30874
  Description of Artificial Sequence: Synthetic casein; inner sequence and 3' sequence

SEQ ID NO: 50197 - DNA, 53 bp, Artificial Sequence; identical to SEQ ID NO: 6571
  Description of Artificial Sequence: Synthetic casein; inner sequence and 3' sequence

SEQ ID NO: 50198 - DNA, 53 bp, Artificial Sequence
  Description of Artificial Sequence: Synthetic casein; inner sequence and 3' sequence
cgtacggaacggcacgtcctgtcctacgcattgactagtacatgaccacttga

SEQ ID NO: 50199 - DNA, 53 bp, Artificial Sequence; identical to SEQ ID NO: 22984
  Description of Artificial Sequence: Synthetic casein; inner sequence and 3' sequence

SEQ ID NO: 50200 - DNA, 53 bp, Artificial Sequence; identical to SEQ ID NO: 2016
  Description of Artificial Sequence: Synthetic casein; inner sequence and 3' sequence

SEQ ID NO: 50201 - DNA, 53 bp, Artificial Sequence; identical to SEQ ID NO: 42829
  Description of Artificial Sequence: Synthetic casein; inner sequence and 3' sequence

SEQ ID NO: 50202 - DNA, 53 bp, Artificial Sequence; identical to SEQ ID NO: 18399
  Description of Artificial Sequence: Synthetic casein; inner sequence and 3' sequence

SEQ ID NO: 50203 - DNA, 53 bp, Artificial Sequence; identical to SEQ ID NO: 46777
  Description of Artificial Sequence: Synthetic casein; inner sequence and 3' sequence

SEQ ID NO: 50204 - DNA, 53 bp, Artificial Sequence; identical to SEQ ID NO: 46159
  Description of Artificial Sequence: Synthetic casein; inner sequence and 3' sequence

SEQ ID NO: 50205 - DNA, 53 bp, Artificial Sequence; identical to SEQ ID NO: 22518
  Description of Artificial Sequence: Synthetic casein; inner sequence and 3' sequence

SEQ ID NO: 50206 - DNA, 53 bp, Artificial Sequence; identical to SEQ ID NO: 2632
  Description of Artificial Sequence: Synthetic casein; inner sequence and 3' sequence

SEQ ID NO: 50207 - DNA, 52 bp, Artificial Sequence; identical to SEQ ID NO: 30565
  Description of Artificial Sequence: Synthetic casein; inner sequence and 3' sequence

SEQ ID NO: 50208 - DNA, 53 bp, Artificial Sequence; identical to SEQ ID NO: 2454
  Description of Artificial Sequence: Synthetic casein; inner sequence and 3' sequence

SEQ ID NO: 50209 - DNA, 53 bp, Artificial Sequence; identical to SEQ ID NO: 46166
  Description of Artificial Sequence: Synthetic casein; inner sequence and 3' sequence

SEQ ID NO: 50210 - DNA, 53 bp, Artificial Sequence; identical to SEQ ID NO: 2051
  Description of Artificial Sequence: Synthetic casein; inner sequence and 3' sequence

SEQ ID NO: 50211 - DNA, 53 bp, Artificial Sequence; identical to SEQ ID NO: 2228
  Description of Artificial Sequence: Synthetic casein; inner sequence and 3' sequence

SEQ ID NO: 50212 - DNA, 53 bp, Artificial Sequence; identical to SEQ ID NO: 6489
  Description of Artificial Sequence: Synthetic casein; inner sequence and 3' sequence

SEQ ID NO: 50213 - DNA, 53 bp, Artificial Sequence; identical to SEQ ID NO: 2232
  Description of Artificial Sequence: Synthetic casein; inner sequence and 3' sequence

SEQ ID NO: 50214 - DNA, 53 bp, Artificial Sequence; identical to SEQ ID NO: 46493
  Description of Artificial Sequence: Synthetic casein; inner sequence and 3' sequence

SEQ ID NO: 50215 - DNA, 53 bp, Artificial Sequence; identical to SEQ ID NO: 46191
  Description of Artificial Sequence: Synthetic casein; inner sequence and 3' sequence

SEQ ID NO: 50216 - DNA, 53 bp, Artificial Sequence; identical to SEQ ID NO: 30582
  Description of Artificial Sequence: Synthetic casein; inner sequence and 3' sequence

SEQ ID NO: 50217 - DNA, 53 bp, Artificial Sequence; identical to SEQ ID NO: 2352
  Description of Artificial Sequence: Synthetic casein; inner sequence and 3' sequence

SEQ ID NO: 50218 - DNA, 53 bp, Artificial Sequence; identical to SEQ ID NO: 2619
  Description of Artificial Sequence: Synthetic casein; inner sequence and 3' sequence

SEQ ID NO: 50219 - DNA, 53 bp, Artificial Sequence; identical to SEQ ID NO: 30735
  Description of Artificial Sequence: Synthetic casein; inner sequence and 3' sequence

SEQ ID NO: 50220 - DNA, 53 bp, Artificial Sequence; identical to SEQ ID NO: 22737
  Description of Artificial Sequence: Synthetic casein; inner sequence and 3' sequence

SEQ ID NO: 50221 - DNA, 53 bp, Artificial Sequence
  Description of Artificial Sequence: Synthetic casein; inner sequence and 3' sequence
gtcacgtcgtcacgcagcatgtacggcacattgactagtacatgaccacttga

SEQ ID NO: 50222 - DNA, 53 bp, Artificial Sequence; identical to SEQ ID NO: 2151
  Description of Artificial Sequence: Synthetic casein; inner sequence and 3' sequence

SEQ ID NO: 50223 - DNA, 53 bp, Artificial Sequence; identical to SEQ ID NO: 6940
  Description of Artificial Sequence: Synthetic casein; inner sequence and 3' sequence

SEQ ID NO: 50224 - DNA, 53 bp, Artificial Sequence; identical to SEQ ID NO: 22889
  Description of Artificial Sequence: Synthetic casein; inner sequence and 3' sequence

SEQ ID NO: 50225 - DNA, 53 bp, Artificial Sequence; identical to SEQ ID NO: 30432
  Description of Artificial Sequence: Synthetic casein; inner sequence and 3' sequence

SEQ ID NO: 50226 - DNA, 53 bp, Artificial Sequence; identical to SEQ ID NO: 2320
  Description of Artificial Sequence: Synthetic casein; inner sequence and 3' sequence

SEQ ID NO: 50227 - DNA, 53 bp, Artificial Sequence; identical to SEQ ID NO: 2891
  Description of Artificial Sequence: Synthetic casein; inner sequence and 3' sequence

SEQ ID NO: 50228 - DNA, 53 bp, Artificial Sequence; identical to SEQ ID NO: 46345
  Description of Artificial Sequence: Synthetic casein; inner sequence and 3' sequence

SEQ ID NO: 50229 - DNA, 53 bp, Artificial Sequence; identical to SEQ ID NO: 2149
  Description of Artificial Sequence: Synthetic casein; inner sequence and 3' sequence

SEQ ID NO: 50230 - DNA, 53 bp, Artificial Sequence; identical to SEQ ID NO: 22519
  Description of Artificial Sequence: Synthetic casein; inner sequence and 3' sequence

SEQ ID NO: 50231 - DNA, 53 bp, Artificial Sequence; identical to SEQ ID NO: 2227
  Description of Artificial Sequence: Synthetic casein; inner sequence and 3' sequence

SEQ ID NO: 50232 - DNA, 53 bp, Artificial Sequence; identical to SEQ ID NO: 46461
  Description of Artificial Sequence: Synthetic casein; inner sequence and 3' sequence

SEQ ID NO: 50233 - DNA, 53 bp, Artificial Sequence; identical to SEQ ID NO: 2192
  Description of Artificial Sequence: Synthetic casein; inner sequence and 3' sequence

SEQ ID NO: 50234 - DNA, 53 bp, Artificial Sequence; identical to SEQ ID NO: 46182
  Description of Artificial Sequence: Synthetic casein; inner sequence and 3' sequence

SEQ ID NO: 50235 - DNA, 53 bp, Artificial Sequence; identical to SEQ ID NO: 22324
  Description of Artificial Sequence: Synthetic casein; inner sequence and 3' sequence

SEQ ID NO: 50236 - DNA, 53 bp, Artificial Sequence; identical to SEQ ID NO: 2131
  Description of Artificial Sequence: Synthetic casein; inner sequence and 3' sequence

SEQ ID NO: 50237 - DNA, 53 bp, Artificial Sequence; identical to SEQ ID NO: 2321
  Description of Artificial Sequence: Synthetic casein; inner sequence and 3' sequence

SEQ ID NO: 50238 - DNA, 52 bp, Artificial Sequence; identical to SEQ ID NO: 30660
  Description of Artificial Sequence: Synthetic casein; inner sequence and 3' sequence

SEQ ID NO: 50239 - DNA, 53 bp, Artificial Sequence; identical to SEQ ID NO: 30315
  Description of Artificial Sequence: Synthetic casein; inner sequence and 3' sequence

SEQ ID NO: 50240 - DNA, 53 bp, Artificial Sequence; identical to SEQ ID NO: 10910
  Description of Artificial Sequence: Synthetic casein; inner sequence and 3' sequence

SEQ ID NO: 50241 - DNA, 53 bp, Artificial Sequence; identical to SEQ ID NO: 2190
  Description of Artificial Sequence: Synthetic casein; inner sequence and 3' sequence

SEQ ID NO: 50242 - DNA, 53 bp, Artificial Sequence; identical to SEQ ID NO: 2207
  Description of Artificial Sequence: Synthetic casein; inner sequence and 3' sequence

SEQ ID NO: 50243 - DNA, 53 bp, Artificial Sequence; identical to SEQ ID NO: 46722
  Description of Artificial Sequence: Synthetic casein; inner sequence and 3' sequence

SEQ ID NO: 50244 - DNA, 53 bp, Artificial Sequence; identical to SEQ ID NO: 18978
  Description of Artificial Sequence: Synthetic casein; inner sequence and 3' sequence

SEQ ID NO: 50245 - DNA, 53 bp, Artificial Sequence; identical to SEQ ID NO: 30173
  Description of Artificial Sequence: Synthetic casein; inner sequence and 3' sequence

SEQ ID NO: 50246 - DNA, 53 bp, Artificial Sequence
  Description of Artificial Sequence: Synthetic casein; inner sequence and 3' sequence
gatgcgtcacgtaaccgtccttgcgtcacgttgactagtacatgaccacttga

SEQ ID NO: 50247 - DNA, 53 bp, Artificial Sequence
  Description of Artificial Sequence: Synthetic casein; inner sequence and 3' sequence
gcgtcacgatgcgacggtatggactgcgtgttgactagtacatgaccacttga

SEQ ID NO: 50248 - DNA, 53 bp, Artificial Sequence; identical to SEQ ID NO: 22302
  Description of Artificial Sequence: Synthetic casein; inner sequence and 3' sequence

SEQ ID NO: 50249 - DNA, 53 bp, Artificial Sequence; identical to SEQ ID NO: 2644
  Description of Artificial Sequence: Synthetic casein; inner sequence and 3' sequence

SEQ ID NO: 50250 - DNA, 53 bp, Artificial Sequence
  Description of Artificial Sequence: Synthetic casein; inner sequence and 3' sequence
gcacgatacgtacctgctatgtacgtcacgttgactagtacatgaccacttga

SEQ ID NO: 50251 - DNA, 53 bp, Artificial Sequence; identical to SEQ ID NO: 18861
  Description of Artificial Sequence: Synthetic casein; inner sequence and 3' sequence

SEQ ID NO: 50252 - DNA, 53 bp, Artificial Sequence; identical to SEQ ID NO: 30688
  Description of Artificial Sequence: Synthetic casein; inner sequence and 3' sequence

SEQ ID NO: 50253 - DNA, 53 bp, Artificial Sequence; identical to SEQ ID NO: 2728
  Description of Artificial Sequence: Synthetic casein; inner sequence and 3' sequence

SEQ ID NO: 50254 - DNA, 53 bp, Artificial Sequence; identical to SEQ ID NO: 30555
  Description of Artificial Sequence: Synthetic casein; inner sequence and 3' sequence

SEQ ID NO: 50255 - DNA, 53 bp, Artificial Sequence; identical to SEQ ID NO: 2274
  Description of Artificial Sequence: Synthetic casein; inner sequence and 3' sequence

SEQ ID NO: 50256 - DNA, 53 bp, Artificial Sequence; identical to SEQ ID NO: 30960
  Description of Artificial Sequence: Synthetic casein; inner sequence and 3' sequence

SEQ ID NO: 50257 - DNA, 53 bp, Artificial Sequence; identical to SEQ ID NO: 46582
  Description of Artificial Sequence: Synthetic casein; inner sequence and 3' sequence

SEQ ID NO: 50258 - DNA, 53 bp, Artificial Sequence; identical to SEQ ID NO: 18513
  Description of Artificial Sequence: Synthetic casein; inner sequence and 3' sequence

SEQ ID NO: 50259 - DNA, 53 bp, Artificial Sequence; identical to SEQ ID NO: 2372
  Description of Artificial Sequence: Synthetic casein; inner sequence and 3' sequence

SEQ ID NO: 50260 - DNA, 53 bp, Artificial Sequence; identical to SEQ ID NO: 2256
  Description of Artificial Sequence: Synthetic casein; inner sequence and 3' sequence

SEQ ID NO: 50261 - DNA, 53 bp, Artificial Sequence; identical to SEQ ID NO: 2204
  Description of Artificial Sequence: Synthetic casein; inner sequence and 3' sequence

SEQ ID NO: 50262 - DNA, 53 bp, Artificial Sequence; identical to SEQ ID NO: 46237
  Description of Artificial Sequence: Synthetic casein; inner sequence and 3' sequence

SEQ ID NO: 50263 - DNA, 53 bp, Artificial Sequence; identical to SEQ ID NO: 30978
  Description of Artificial Sequence: Synthetic casein; inner sequence and 3' sequence

SEQ ID NO: 50264 - DNA, 53 bp, Artificial Sequence; identical to SEQ ID NO: 2249
  Description of Artificial Sequence: Synthetic casein; inner sequence and 3' sequence

SEQ ID NO: 50265 - DNA, 53 bp, Artificial Sequence; identical to SEQ ID NO: 30924
  Description of Artificial Sequence: Synthetic casein; inner sequence and 3' sequence

SEQ ID NO: 50266 - DNA, 53 bp, Artificial Sequence; identical to SEQ ID NO: 46348
  Description of Artificial Sequence: Synthetic casein; inner sequence and 3' sequence

SEQ ID NO: 50267 - DNA, 53 bp, Artificial Sequence; identical to SEQ ID NO: 30158
  Description of Artificial Sequence: Synthetic casein; inner sequence and 3' sequence

SEQ ID NO: 50268 - DNA, 53 bp, Artificial Sequence; identical to SEQ ID NO: 2115
  Description of Artificial Sequence: Synthetic casein; inner sequence and 3' sequence

SEQ ID NO: 50269 - DNA, 53 bp, Artificial Sequence; identical to SEQ ID NO: 2397
  Description of Artificial Sequence: Synthetic casein; inner sequence and 3' sequence

SEQ ID NO: 50270 - DNA, 53 bp, Artificial Sequence; identical to SEQ ID NO: 22560
  Description of Artificial Sequence: Synthetic casein; inner sequence and 3' sequence

SEQ ID NO: 50271 - DNA, 49 bp, Artificial Sequence; identical to SEQ ID NO: 2893
  Description of Artificial Sequence: Synthetic casein; inner sequence and 3' sequence

SEQ ID NO: 50272 - DNA, 53 bp, Artificial Sequence; identical to SEQ ID NO: 30808
  Description of Artificial Sequence: Synthetic casein; inner sequence and 3' sequence

SEQ ID NO: 50273 - DNA, 53 bp, Artificial Sequence; identical to SEQ ID NO: 46698
  Description of Artificial Sequence: Synthetic casein; inner sequence and 3' sequence

SEQ ID NO: 50274 - DNA, 51 bp, Artificial Sequence; identical to SEQ ID NO: 6786
  Description of Artificial Sequence: Synthetic casein; inner sequence and 3' sequence

SEQ ID NO: 50275 - DNA, 53 bp, Artificial Sequence; identical to SEQ ID NO: 30693
  Description of Artificial Sequence: Synthetic casein; inner sequence and 3' sequence

SEQ ID NO: 50276 - DNA, 53 bp, Artificial Sequence; identical to SEQ ID NO: 30996
  Description of Artificial Sequence: Synthetic casein; inner sequence and 3' sequence

SEQ ID NO: 50277 - DNA, 53 bp, Artificial Sequence; identical to SEQ ID NO: 30416
  Description of Artificial Sequence: Synthetic casein; inner sequence and 3' sequence

SEQ ID NO: 50278 - DNA, 53 bp, Artificial Sequence; identical to SEQ ID NO: 22836
  Description of Artificial Sequence: Synthetic casein; inner sequence and 3' sequence

SEQ ID NO: 50279 - DNA, 53 bp, Artificial Sequence; identical to SEQ ID NO: 2031
  Description of Artificial Sequence: Synthetic casein; inner sequence and 3' sequence

SEQ ID NO: 50280 - DNA, 52 bp, Artificial Sequence; identical to SEQ ID NO: 46435
  Description of Artificial Sequence: Synthetic casein; inner sequence and 3' sequence

SEQ ID NO: 50281 - DNA, 53 bp, Artificial Sequence; identical to SEQ ID NO: 18819
  Description of Artificial Sequence: Synthetic casein; inner sequence and 3' sequence

SEQ ID NO: 50282 - DNA, 53 bp, Artificial Sequence; identical to SEQ ID NO: 30959
  Description of Artificial Sequence: Synthetic casein; inner sequence and 3' sequence

SEQ ID NO: 50283 - DNA, 53 bp, Artificial Sequence; identical to SEQ ID NO: 2177
  Description of Artificial Sequence: Synthetic casein; inner sequence and 3' sequence

SEQ ID NO: 50284 - DNA, 53 bp, Artificial Sequence; identical to SEQ ID NO: 30934
  Description of Artificial Sequence: Synthetic casein; inner sequence and 3' sequence

SEQ ID NO: 50285 - DNA, 53 bp, Artificial Sequence; identical to SEQ ID NO: 46479
  Description of Artificial Sequence: Synthetic casein; inner sequence and 3' sequence

SEQ ID NO: 50286 - DNA, 53 bp, Artificial Sequence; identical to SEQ ID NO: 2776
  Description of Artificial Sequence: Synthetic casein; inner sequence and 3' sequence

SEQ ID NO: 50287 - DNA, 53 bp, Artificial Sequence; identical to SEQ ID NO: 30793
  Description of Artificial Sequence: Synthetic casein; inner sequence and 3' sequence

SEQ ID NO: 50288 - DNA, 53 bp, Artificial Sequence; identical to SEQ ID NO: 46490
  Description of Artificial Sequence: Synthetic casein; inner sequence and 3' sequence

SEQ ID NO: 50289 - DNA, 53 bp, Artificial Sequence; identical to SEQ ID NO: 30754
  Description of Artificial Sequence: Synthetic casein; inner sequence and 3' sequence

SEQ ID NO: 50290 - DNA, 53 bp, Artificial Sequence; identical to SEQ ID NO: 2884
  Description of Artificial Sequence: Synthetic casein; inner sequence and 3' sequence

SEQ ID NO: 50291 - DNA, 53 bp, Artificial Sequence; identical to SEQ ID NO: 2114
  Description of Artificial Sequence: Synthetic casein; inner sequence and 3' sequence

SEQ ID NO: 50292 - DNA, 53 bp, Artificial Sequence
  Description of Artificial Sequence: Synthetic casein; inner sequence and 3' sequence
gcgtcacgccacatgtacgtatgcgtcacgttgactagtacatgaccacttga

SEQ ID NO: 50293 - DNA, 53 bp, Artificial Sequence; identical to SEQ ID NO: 46819
  Description of Artificial Sequence: Synthetic casein; inner sequence and 3' sequence

SEQ ID NO: 50294 - DNA, 53 bp, Artificial Sequence; identical to SEQ ID NO: 2909
  Description of Artificial Sequence: Synthetic casein; inner sequence and 3' sequence

SEQ ID NO: 50295 - DNA, 53 bp, Artificial Sequence; identical to SEQ ID NO: 2591
  Description of Artificial Sequence: Synthetic casein; inner sequence and 3' sequence

SEQ ID NO: 50296 - DNA, 53 bp, Artificial Sequence; identical to SEQ ID NO: 2955
  Description of Artificial Sequence: Synthetic casein; inner sequence and 3' sequence

SEQ ID NO: 50297 - DNA, 53 bp, Artificial Sequence; identical to SEQ ID NO: 46344
  Description of Artificial Sequence: Synthetic casein; inner sequence and 3' sequence

SEQ ID NO: 50298 - DNA, 53 bp, Artificial Sequence; identical to SEQ ID NO: 18703
  Description of Artificial Sequence: Synthetic casein; inner sequence and 3' sequence

SEQ ID NO: 50299 - DNA, 53 bp, Artificial Sequence; identical to SEQ ID NO: 46744
  Description of Artificial Sequence: Synthetic casein; inner sequence and 3' sequence

SEQ ID NO: 50300 - DNA, 53 bp, Artificial Sequence; identical to SEQ ID NO: 46439
  Description of Artificial Sequence: Synthetic casein; inner sequence and 3' sequence

SEQ ID NO: 50301 - DNA, 53 bp, Artificial Sequence; identical to SEQ ID NO: 6743
  Description of Artificial Sequence: Synthetic casein; inner sequence and 3' sequence

SEQ ID NO: 50302 - DNA, 53 bp, Artificial Sequence; identical to SEQ ID NO: 2358
  Description of Artificial Sequence: Synthetic casein; inner sequence and 3' sequence

SEQ ID NO: 50303 - DNA, 53 bp, Artificial Sequence; identical to SEQ ID NO: 30603
  Description of Artificial Sequence: Synthetic casein; inner sequence and 3' sequence

SEQ ID NO: 50304 - DNA, 53 bp, Artificial Sequence; identical to SEQ ID NO: 2901
  Description of Artificial Sequence: Synthetic casein; inner sequence and 3' sequence

SEQ ID NO: 50305 - DNA, 53 bp, Artificial Sequence; identical to SEQ ID NO: 6620
  Description of Artificial Sequence: Synthetic casein; inner sequence and 3' sequence

SEQ ID NO: 50306 - DNA, 49 bp, Artificial Sequence
  Description of Artificial Sequence: Synthetic casein; inner sequence and 3' sequence
ggacgcaacgtaccgccgtggccatgttgactagtacatgaccacttga

SEQ ID NO: 50307 - DNA, 53 bp, Artificial Sequence; identical to SEQ ID NO: 2144
  Description of Artificial Sequence: Synthetic casein; inner sequence and 3' sequence

SEQ ID NO: 50308 - DNA, 53 bp, Artificial Sequence; identical to SEQ ID NO: 46614
  Description of Artificial Sequence: Synthetic casein; inner sequence and 3' sequence

SEQ ID NO: 50309 - DNA, 53 bp, Artificial Sequence; identical to SEQ ID NO: 2351
  Description of Artificial Sequence: Synthetic casein; inner sequence and 3' sequence

SEQ ID NO: 50310 - DNA, 53 bp, Artificial Sequence; identical to SEQ ID NO: 2137
  Description of Artificial Sequence: Synthetic casein; inner sequence and 3' sequence

SEQ ID NO: 50311 - DNA, 53 bp, Artificial Sequence; identical to SEQ ID NO: 2823
  Description of Artificial Sequence: Synthetic casein; inner sequence and 3' sequence

SEQ ID NO: 50312 - DNA, 53 bp, Artificial Sequence; identical to SEQ ID NO: 30744
  Description of Artificial Sequence: Synthetic casein; inner sequence and 3' sequence

SEQ ID NO: 50313 - DNA, 53 bp, Artificial Sequence; identical to SEQ ID NO: 26984
  Description of Artificial Sequence: Synthetic casein; inner sequence and 3' sequence

SEQ ID NO: 50314 - DNA, 53 bp, Artificial Sequence; identical to SEQ ID NO: 2615
  Description of Artificial Sequence: Synthetic casein; inner sequence and 3' sequence

SEQ ID NO: 50315 - DNA, 53 bp, Artificial Sequence; identical to SEQ ID NO: 46251
  Description of Artificial Sequence: Synthetic casein; inner sequence and 3' sequence

SEQ ID NO: 50316 - DNA, 53 bp, Artificial Sequence; identical to SEQ ID NO: 30516
  Description of Artificial Sequence: Synthetic casein; inner sequence and 3' sequence

SEQ ID NO: 50317 - DNA, 53 bp, Artificial Sequence; identical to SEQ ID NO: 22478
  Description of Artificial Sequence: Synthetic casein; inner sequence and 3' sequence

SEQ ID NO: 50318 - DNA, 53 bp, Artificial Sequence; identical to SEQ ID NO: 30591
  Description of Artificial Sequence: Synthetic casein; inner sequence and 3' sequence

SEQ ID NO: 50319 - DNA, 53 bp, Artificial Sequence; identical to SEQ ID NO: 22466
  Description of Artificial Sequence: Synthetic casein; inner sequence and 3' sequence

SEQ ID NO: 50320 - DNA, 53 bp, Artificial Sequence; identical to SEQ ID NO: 2060
  Description of Artificial Sequence: Synthetic casein; inner sequence and 3' sequence

SEQ ID NO: 50321 - DNA, 53 bp, Artificial Sequence; identical to SEQ ID NO: 2289
  Description of Artificial Sequence: Synthetic casein; inner sequence and 3' sequence

SEQ ID NO: 50322 - DNA, 53 bp, Artificial Sequence
  Description of Artificial Sequence: Synthetic casein; inner sequence and 3' sequence
cgttgcgcacgcacgtcatgtggatgcacgttgactagtacatgaccacttga

SEQ ID NO: 50323 - DNA, 53 bp, Artificial Sequence; identical to SEQ ID NO: 22769
  Description of Artificial Sequence: Synthetic casein; inner sequence and 3' sequence

SEQ ID NO: 50324 - DNA, 53 bp, Artificial Sequence; identical to SEQ ID NO: 2038
  Description of Artificial Sequence: Synthetic casein; inner sequence and 3' sequence

SEQ ID NO: 50325 - DNA, 53 bp, Artificial Sequence; identical to SEQ ID NO: 6938
  Description of Artificial Sequence: Synthetic casein; inner sequence and 3' sequence

SEQ ID NO: 50326 - DNA, 53 bp, Artificial Sequence; identical to SEQ ID NO: 2225
  Description of Artificial Sequence: Synthetic casein; inner sequence and 3' sequence

SEQ ID NO: 50327 - DNA, 53 bp, Artificial Sequence; identical to SEQ ID NO: 2244
  Description of Artificial Sequence: Synthetic casein; inner sequence and 3' sequence

SEQ ID NO: 50328 - DNA, 53 bp, Artificial Sequence; identical to SEQ ID NO: 6960
  Description of Artificial Sequence: Synthetic casein; inner sequence and 3' sequence

SEQ ID NO: 50329 - DNA, 53 bp, Artificial Sequence; identical to SEQ ID NO: 22811
  Description of Artificial Sequence: Synthetic casein; inner sequence and 3' sequence

SEQ ID NO: 50330 - DNA, 53 bp, Artificial Sequence; identical to SEQ ID NO: 18948
  Description of Artificial Sequence: Synthetic casein; inner sequence and 3' sequence

SEQ ID NO: 50331 - DNA, 53 bp, Artificial Sequence; identical to SEQ ID NO: 46472
  Description of Artificial Sequence: Synthetic casein; inner sequence and 3' sequence

SEQ ID NO: 50332 - DNA, 53 bp, Artificial Sequence; identical to SEQ ID NO: 2367
  Description of Artificial Sequence: Synthetic casein; inner sequence and 3' sequence

SEQ ID NO: 50333 - DNA, 53 bp, Artificial Sequence; identical to SEQ ID NO: 30114
  Description of Artificial Sequence: Synthetic casein; inner sequence and 3' sequence

SEQ ID NO: 50334 - DNA, 53 bp, Artificial Sequence; identical to SEQ ID NO: 2141
  Description of Artificial Sequence: Synthetic casein; inner sequence and 3' sequence

SEQ ID NO: 50335 - DNA, 53 bp, Artificial Sequence; identical to SEQ ID NO: 30747
  Description of Artificial Sequence: Synthetic casein; inner sequence and 3' sequence

SEQ ID NO: 50336 - DNA, 53 bp, Artificial Sequence; identical to SEQ ID NO: 18585
  Description of Artificial Sequence: Synthetic casein; inner sequence and 3' sequence

SEQ ID NO: 50337 - DNA, 53 bp, Artificial Sequence; identical to SEQ ID NO: 2706
  Description of Artificial Sequence: Synthetic casein; inner sequence and 3' sequence

SEQ ID NO: 50338 - DNA, 53 bp, Artificial Sequence; identical to SEQ ID NO: 2780
  Description of Artificial Sequence: Synthetic casein; inner sequence and 3' sequence

SEQ ID NO: 50339 - DNA, 53 bp, Artificial Sequence; identical to SEQ ID NO: 46293
  Description of Artificial Sequence: Synthetic casein; inner sequence and 3' sequence

SEQ ID NO: 50340 - DNA, 53 bp, Artificial Sequence; identical to SEQ ID NO: 2117
  Description of Artificial Sequence: Synthetic casein; inner sequence and 3' sequence

SEQ ID NO: 50341 - DNA, 53 bp, Artificial Sequence; identical to SEQ ID NO: 2344
  Description of Artificial Sequence: Synthetic casein; inner sequence and 3' sequence

SEQ ID NO: 50342 - DNA, 53 bp, Artificial Sequence; identical to SEQ ID NO: 2860
  Description of Artificial Sequence: Synthetic casein; inner sequence and 3' sequence

SEQ ID NO: 50343 - DNA, 53 bp, Artificial Sequence; identical to SEQ ID NO: 30389
  Description of Artificial Sequence: Synthetic casein; inner sequence and 3' sequence

SEQ ID NO: 50344 - DNA, 53 bp, Artificial Sequence; identical to SEQ ID NO: 6638
  Description of Artificial Sequence: Synthetic casein; inner sequence and 3' sequence

SEQ ID NO: 50345 - DNA, 53 bp, Artificial Sequence; identical to SEQ ID NO: 2290
  Description of Artificial Sequence: Synthetic casein; inner sequence and 3' sequence

SEQ ID NO: 50346 - DNA, 53 bp, Artificial Sequence; identical to SEQ ID NO: 2074
  Description of Artificial Sequence: Synthetic casein; inner sequence and 3' sequence

SEQ ID NO: 50347 - DNA, 53 bp, Artificial Sequence; identical to SEQ ID NO: 22613
  Description of Artificial Sequence: Synthetic casein; inner sequence and 3' sequence

SEQ ID NO: 50348 - DNA, 53 bp, Artificial Sequence; identical to SEQ ID NO: 2877
  Description of Artificial Sequence: Synthetic casein; inner sequence and 3' sequence

SEQ ID NO: 50349 - DNA, 53 bp, Artificial Sequence; identical to SEQ ID NO: 2246
  Description of Artificial Sequence: Synthetic casein; inner sequence and 3' sequence

SEQ ID NO: 50350 - DNA, 53 bp, Artificial Sequence; identical to SEQ ID NO: 22730
  Description of Artificial Sequence: Synthetic casein; inner sequence and 3' sequence

SEQ ID NO: 50351 - DNA, 53 bp, Artificial Sequence
  Description of Artificial Sequence: Synthetic casein; inner sequence and 3' sequence
acgtgcgtacgcgtcgtgacgtactgcgtgttgactagtacatgaccacttga

SEQ ID NO: 50352 - DNA, 53 bp, Artificial Sequence; identical to SEQ ID NO: 2248
  Description of Artificial Sequence: Synthetic casein; inner sequence and 3' sequence

SEQ ID NO: 50353 - DNA, 53 bp, Artificial Sequence; identical to SEQ ID NO: 30780
  Description of Artificial Sequence: Synthetic casein; inner sequence and 3' sequence

SEQ ID NO: 50354 - DNA, 53 bp, Artificial Sequence; identical to SEQ ID NO: 18906
  Description of Artificial Sequence: Synthetic casein; inner sequence and 3' sequence

SEQ ID NO: 50355 - DNA, 53 bp, Artificial Sequence; identical to SEQ ID NO: 30909
  Description of Artificial Sequence: Synthetic casein; inner sequence and 3' sequence

SEQ ID NO: 50356 - DNA, 53 bp, Artificial Sequence; identical to SEQ ID NO: 46256
  Description of Artificial Sequence: Synthetic casein; inner sequence and 3' sequence

SEQ ID NO: 50357 - DNA, 53 bp, Artificial Sequence; identical to SEQ ID NO: 46314
  Description of Artificial Sequence: Synthetic casein; inner sequence and 3' sequence

SEQ ID NO: 50358 - DNA, 53 bp, Artificial Sequence; identical to SEQ ID NO: 18504
  Description of Artificial Sequence: Synthetic casein; inner sequence and 3' sequence

SEQ ID NO: 50359 - DNA, 53 bp, Artificial Sequence; identical to SEQ ID NO: 10946
  Description of Artificial Sequence: Synthetic casein; inner sequence and 3' sequence

SEQ ID NO: 50360 - DNA, 53 bp, Artificial Sequence; identical to SEQ ID NO: 46214
  Description of Artificial Sequence: Synthetic casein; inner sequence and 3' sequence

SEQ ID NO: 50361 - DNA, 53 bp, Artificial Sequence; identical to SEQ ID NO: 2169
  Description of Artificial Sequence: Synthetic casein; inner sequence and 3' sequence

SEQ ID NO: 50362 - DNA, 53 bp, Artificial Sequence; identical to SEQ ID NO: 46189
  Description of Artificial Sequence: Synthetic casein; inner sequence and 3' sequence

SEQ ID NO: 50363 - DNA, 53 bp, Artificial Sequence; identical to SEQ ID NO: 10810
  Description of Artificial Sequence: Synthetic casein; inner sequence and 3' sequence

SEQ ID NO: 50364 - DNA, 53 bp, Artificial Sequence; identical to SEQ ID NO: 46741
  Description of Artificial Sequence: Synthetic casein; inner sequence and 3' sequence

SEQ ID NO: 50365 - DNA, 53 bp, Artificial Sequence; identical to SEQ ID NO: 30957
  Description of Artificial Sequence: Synthetic casein; inner sequence and 3' sequence

SEQ ID NO: 50366 - DNA, 53 bp, Artificial Sequence; identical to SEQ ID NO: 18342
  Description of Artificial Sequence: Synthetic casein; inner sequence and 3' sequence

SEQ ID NO: 50367 - DNA, 53 bp, Artificial Sequence; identical to SEQ ID NO: 46983
  Description of Artificial Sequence: Synthetic casein; inner sequence and 3' sequence

SEQ ID NO: 50368 - DNA, 53 bp, Artificial Sequence; identical to SEQ ID NO: 2326
  Description of Artificial Sequence: Synthetic casein; inner sequence and 3' sequence

SEQ ID NO: 50369 - DNA, 53 bp, Artificial Sequence; identical to SEQ ID NO: 30993
  Description of Artificial Sequence: Synthetic casein; inner sequence and 3' sequence

SEQ ID NO: 50370 - DNA, 53 bp, Artificial Sequence; identical to SEQ ID NO: 30964
  Description of Artificial Sequence: Synthetic casein; inner sequence and 3' sequence

SEQ ID NO: 50371 - DNA, 55 bp, Artificial Sequence; identical to SEQ ID NO: 46452
  Description of Artificial Sequence: Synthetic casein; inner sequence and 3' sequence

SEQ ID NO: 50372 - DNA, 53 bp, Artificial Sequence; identical to SEQ ID NO: 2042
  Description of Artificial Sequence: Synthetic casein; inner sequence and 3' sequence

SEQ ID NO: 50373 - DNA, 53 bp, Artificial Sequence; identical to SEQ ID NO: 46372
  Description of Artificial Sequence: Synthetic casein; inner sequence and 3' sequence

SEQ ID NO: 50374 - DNA, 53 bp, Artificial Sequence; identical to SEQ ID NO: 2104
  Description of Artificial Sequence: Synthetic casein; inner sequence and 3' sequence

SEQ ID NO: 50375 - DNA, 53 bp, Artificial Sequence; identical to SEQ ID NO: 30921
  Description of Artificial Sequence: Synthetic casein; inner sequence and 3' sequence

SEQ ID NO: 50376 - DNA, 53 bp, Artificial Sequence; identical to SEQ ID NO: 2560
  Description of Artificial Sequence: Synthetic casein; inner sequence and 3' sequence

SEQ ID NO: 50377 - DNA, 53 bp, Artificial Sequence; identical to SEQ ID NO: 2493
  Description of Artificial Sequence: Synthetic casein; inner sequence and 3' sequence

SEQ ID NO: 50378 - DNA, 53 bp, Artificial Sequence; identical to SEQ ID NO: 18862
  Description of Artificial Sequence: Synthetic casein; inner sequence and 3' sequence

SEQ ID NO: 50379 - DNA, 53 bp, Artificial Sequence; identical to SEQ ID NO: 6621
  Description of Artificial Sequence: Synthetic casein; inner sequence and 3' sequence

SEQ ID NO: 50380 - DNA, 53 bp, Artificial Sequence; identical to SEQ ID NO: 30739
  Description of Artificial Sequence: Synthetic casein; inner sequence and 3' sequence

SEQ ID NO: 50381 - DNA, 53 bp, Artificial Sequence; identical to SEQ ID NO: 2082
  Description of Artificial Sequence: Synthetic casein; inner sequence and 3' sequence

SEQ ID NO: 50382 - DNA, 53 bp, Artificial Sequence
  Description of Artificial Sequence: Synthetic casein; inner sequence and 3' sequence
ggacgcaacgtaccgtatcatgtaggcatgttgactagtacatgaccacttga

SEQ ID NO: 50383 - DNA, 53 bp, Artificial Sequence; identical to SEQ ID NO: 30805
  Description of Artificial Sequence: Synthetic casein; inner sequence and 3' sequence

SEQ ID NO: 50384 - DNA, 53 bp, Artificial Sequence; identical to SEQ ID NO: 46385
  Description of Artificial Sequence: Synthetic casein; inner sequence and 3' sequence

SEQ ID NO: 50385 - DNA, 53 bp, Artificial Sequence; identical to SEQ ID NO: 2050
  Description of Artificial Sequence: Synthetic casein; inner sequence and 3' sequence

SEQ ID NO: 50386 - DNA, 53 bp, Artificial Sequence; identical to SEQ ID NO: 46507
  Description of Artificial Sequence: Synthetic casein; inner sequence and 3' sequence

SEQ ID NO: 50387 - DNA, 51 bp, Artificial Sequence
  Description of Artificial Sequence: Synthetic casein; inner sequence and 3' sequence
ggacgcaacgtaccttatcgtggccatgttgactagtacatgaccacttga

SEQ ID NO: 50388 - DNA, 53 bp, Artificial Sequence; identical to SEQ ID NO: 46305
  Description of Artificial Sequence: Synthetic casein; inner sequence and 3' sequence

SEQ ID NO: 50389 - DNA, 53 bp, Artificial Sequence; identical to SEQ ID NO: 2098
  Description of Artificial Sequence: Synthetic casein; inner sequence and 3' sequence

SEQ ID NO: 50390 - DNA, 53 bp, Artificial Sequence; identical to SEQ ID NO: 22722
  Description of Artificial Sequence: Synthetic casein; inner sequence and 3' sequence

SEQ ID NO: 50391 - DNA, 53 bp, Artificial Sequence; identical to SEQ ID NO: 30312
  Description of Artificial Sequence: Synthetic casein; inner sequence and 3' sequence

SEQ ID NO: 50392 - DNA, 53 bp, Artificial Sequence; identical to SEQ ID NO: 6576
  Description of Artificial Sequence: Synthetic casein; inner sequence and 3' sequence

SEQ ID NO: 50393 - DNA, 53 bp, Artificial Sequence; identical to SEQ ID NO: 30503
  Description of Artificial Sequence: Synthetic casein; inner sequence and 3' sequence

SEQ ID NO: 50394 - DNA, 53 bp, Artificial Sequence; identical to SEQ ID NO: 34384
  Description of Artificial Sequence: Synthetic casein; inner sequence and 3' sequence

SEQ ID NO: 50395 - DNA, 53 bp, Artificial Sequence; identical to SEQ ID NO: 46657
  Description of Artificial Sequence: Synthetic casein; inner sequence and 3' sequence

SEQ ID NO: 50396 - DNA, 53 bp, Artificial Sequence; identical to SEQ ID NO: 22983
  Description of Artificial Sequence: Synthetic casein; inner sequence and 3' sequence

SEQ ID NO: 50397 - DNA, 53 bp, Artificial Sequence; identical to SEQ ID NO: 2152
  Description of Artificial Sequence: Synthetic casein; inner sequence and 3' sequence

SEQ ID NO: 50398 - DNA, 53 bp, Artificial Sequence; identical to SEQ ID NO: 46846
  Description of Artificial Sequence: Synthetic casein; inner sequence and 3' sequence

SEQ ID NO: 50399 - DNA, 53 bp, Artificial Sequence; identical to SEQ ID NO: 2634
  Description of Artificial Sequence: Synthetic casein; inner sequence and 3' sequence

SEQ ID NO: 50400 - DNA, 53 bp, Artificial Sequence; identical to SEQ ID NO: 46225
  Description of Artificial Sequence: Synthetic casein; inner sequence and 3' sequence

SEQ ID NO: 50401 - DNA, 53 bp, Artificial Sequence; identical to SEQ ID NO: 46547
  Description of Artificial Sequence: Synthetic casein; inner sequence and 3' sequence

SEQ ID NO: 50402 - DNA, 53 bp, Artificial Sequence; identical to SEQ ID NO: 2857
  Description of Artificial Sequence: Synthetic casein; inner sequence and 3' sequence

SEQ ID NO: 50403 - DNA, 53 bp, Artificial Sequence; identical to SEQ ID NO: 6579
  Description of Artificial Sequence: Synthetic casein; inner sequence and 3' sequence

SEQ ID NO: 50404 - DNA, 53 bp, Artificial Sequence; identical to SEQ ID NO: 2236
  Description of Artificial Sequence: Synthetic casein; inner sequence and 3' sequence

SEQ ID NO: 50405 - DNA, 53 bp, Artificial Sequence; identical to SEQ ID NO: 2291
  Description of Artificial Sequence: Synthetic casein; inner sequence and 3' sequence

SEQ ID NO: 50406 - DNA, 53 bp, Artificial Sequence; identical to SEQ ID NO: 46465
  Description of Artificial Sequence: Synthetic casein; inner sequence and 3' sequence

SEQ ID NO: 50407 - DNA, 53 bp, Artificial Sequence
  Description of Artificial Sequence: Synthetic casein; inner sequence and 3' sequence
gcgtcacggatcatgcgtacgtatcgtgcgttgactagtacatgaccacttga

SEQ ID NO: 50408 - DNA, 53 bp, Artificial Sequence; identical to SEQ ID NO: 46388
  Description of Artificial Sequence: Synthetic casein; inner sequence and 3' sequence

SEQ ID NO: 50409 - DNA, 53 bp, Artificial Sequence; identical to SEQ ID NO: 46509
  Description of Artificial Sequence: Synthetic casein; inner sequence and 3' sequence

SEQ ID NO: 50410 - DNA, 53 bp, Artificial Sequence; identical to SEQ ID NO: 2275
  Description of Artificial Sequence: Synthetic casein; inner sequence and 3' sequence

SEQ ID NO: 50411 - DNA, 53 bp, Artificial Sequence; identical to SEQ ID NO: 6419
  Description of Artificial Sequence: Synthetic casein; inner sequence and 3' sequence

SEQ ID NO: 50412 - DNA, 53 bp, Artificial Sequence; identical to SEQ ID NO: 46454
  Description of Artificial Sequence: Synthetic casein; inner sequence and 3' sequence

SEQ ID NO: 50413 - DNA, 53 bp, Artificial Sequence; identical to SEQ ID NO: 46444
  Description of Artificial Sequence: Synthetic casein; inner sequence and 3' sequence

SEQ ID NO: 50414 - DNA, 53 bp, Artificial Sequence; identical to SEQ ID NO: 46886
  Description of Artificial Sequence: Synthetic casein; inner sequence and 3' sequence

SEQ ID NO: 50415 - DNA, 53 bp, Artificial Sequence; identical to SEQ ID NO: 2647
  Description of Artificial Sequence: Synthetic casein; inner sequence and 3' sequence

SEQ ID NO: 50416 - DNA, 53 bp, Artificial Sequence; identical to SEQ ID NO: 46367
  Description of Artificial Sequence: Synthetic casein; inner sequence and 3' sequence

SEQ ID NO: 50417 - DNA, 53 bp, Artificial Sequence; identical to SEQ ID NO: 46878
  Description of Artificial Sequence: Synthetic casein; inner sequence and 3' sequence

SEQ ID NO: 50418 - DNA, 53 bp, Artificial Sequence
  Description of Artificial Sequence: Synthetic casein; inner sequence and 3' sequence
gttgcgcacacataccgttcgtacgtcacgttgactagtacatgaccacttga

SEQ ID NO: 50419 - DNA, 53 bp, Artificial Sequence; identical to SEQ ID NO: 7000
  Description of Artificial Sequence: Synthetic casein; inner sequence and 3' sequence

SEQ ID NO: 50420 - DNA, 53 bp, Artificial Sequence; identical to SEQ ID NO: 2090
  Description of Artificial Sequence: Synthetic casein; inner sequence and 3' sequence

SEQ ID NO: 50421 - DNA, 53 bp, Artificial Sequence; identical to SEQ ID NO: 30659
  Description of Artificial Sequence: Synthetic casein; inner sequence and 3' sequence

SEQ ID NO: 50422 - DNA, 53 bp, Artificial Sequence; identical to SEQ ID NO: 46370
  Description of Artificial Sequence: Synthetic casein; inner sequence and 3' sequence

SEQ ID NO: 50423 - DNA, 53 bp, Artificial Sequence; identical to SEQ ID NO: 2561
  Description of Artificial Sequence: Synthetic casein; inner sequence and 3' sequence

SEQ ID NO: 50424 - DNA, 53 bp, Artificial Sequence; identical to SEQ ID NO: 46391
  Description of Artificial Sequence: Synthetic casein; inner sequence and 3' sequence

SEQ ID NO: 50425 - DNA, 53 bp, Artificial Sequence; identical to SEQ ID NO: 46287
  Description of Artificial Sequence: Synthetic casein; inner sequence and 3' sequence

SEQ ID NO: 50426 - DNA, 53 bp, Artificial Sequence; identical to SEQ ID NO: 30914
  Description of Artificial Sequence: Synthetic casein; inner sequence and 3' sequence

SEQ ID NO: 50427 - DNA, 53 bp, Artificial Sequence; identical to SEQ ID NO: 10928
  Description of Artificial Sequence: Synthetic casein; inner sequence and 3' sequence

SEQ ID NO: 50428 - DNA, 53 bp, Artificial Sequence; identical to SEQ ID NO: 22776
  Description of Artificial Sequence: Synthetic casein; inner sequence and 3' sequence

SEQ ID NO: 50429 - DNA, 53 bp, Artificial Sequence; identical to SEQ ID NO: 2492
  Description of Artificial Sequence: Synthetic casein; inner sequence and 3' sequence

SEQ ID NO: 50430 - DNA, 53 bp, Artificial Sequence; identical to SEQ ID NO: 6933
  Description of Artificial Sequence: Synthetic casein; inner sequence and 3' sequence

SEQ ID NO: 50431 - DNA, 52 bp, Artificial Sequence
  Description of Artificial Sequence: Synthetic casein; inner sequence and 3' sequence
gcgtgtgacgtgcagcatgtgtcgtgacattgactagtacatgaccacttga

SEQ ID NO: 50432 - DNA, 53 bp, Artificial Sequence; identical to SEQ ID NO: 2375
  Description of Artificial Sequence: Synthetic casein; inner sequence and 3' sequence

SEQ ID NO: 50433 - DNA, 53 bp, Artificial Sequence; identical to SEQ ID NO: 46873
  Description of Artificial Sequence: Synthetic casein; inner sequence and 3' sequence

SEQ ID NO: 50434 - DNA, 53 bp, Artificial Sequence; identical to SEQ ID NO: 2742
  Description of Artificial Sequence: Synthetic casein; inner sequence and 3' sequence

SEQ ID NO: 50435 - DNA, 53 bp, Artificial Sequence
  Description of Artificial Sequence: Synthetic casein; inner sequence and 3' sequence
cgatacgtaggcatggcgtgtacgtgcacattgactagtacatgaccacttga

SEQ ID NO: 50436 - DNA, 53 bp, Artificial Sequence; identical to SEQ ID NO: 46859
  Description of Artificial Sequence: Synthetic casein; inner sequence and 3' sequence

SEQ ID NO: 50437 - DNA, 53 bp, Artificial Sequence; identical to SEQ ID NO: 18389
  Description of Artificial Sequence: Synthetic casein; inner sequence and 3' sequence

SEQ ID NO: 50438 - DNA, 53 bp, Artificial Sequence; identical to SEQ ID NO: 30665
  Description of Artificial Sequence: Synthetic casein; inner sequence and 3' sequence

SEQ ID NO: 50439 - DNA, 53 bp, Artificial Sequence; identical to SEQ ID NO: 46389
  Description of Artificial Sequence: Synthetic casein; inner sequence and 3' sequence

SEQ ID NO: 50440 - DNA, 53 bp, Artificial Sequence
  Description of Artificial Sequence: Synthetic casein; inner sequence and 3' sequence
ggacgcaacgtaccgtctcgtggccatgtgttgactagtacatgaccacttga

SEQ ID NO: 50441 - DNA, 53 bp, Artificial Sequence; identical to SEQ ID NO: 2061
  Description of Artificial Sequence: Synthetic casein; inner sequence and 3' sequence

SEQ ID NO: 50442 - DNA, 53 bp, Artificial Sequence; identical to SEQ ID NO: 6867
  Description of Artificial Sequence: Synthetic casein; inner sequence and 3' sequence

SEQ ID NO: 50443 - DNA, 53 bp, Artificial Sequence; identical to SEQ ID NO: 22784
  Description of Artificial Sequence: Synthetic casein; inner sequence and 3' sequence

SEQ ID NO: 50444 - DNA, 54 bp, Artificial Sequence; identical to SEQ ID NO: 2221
  Description of Artificial Sequence: Synthetic casein; inner sequence and 3' sequence

SEQ ID NO: 50445 - DNA, 53 bp, Artificial Sequence; identical to SEQ ID NO: 30306
  Description of Artificial Sequence: Synthetic casein; inner sequence and 3' sequence

SEQ ID NO: 50446 - DNA, 53 bp, Artificial Sequence
  Description of Artificial Sequence: Synthetic casein; inner sequence and 3' sequence
gcgtcacagcacatcgccttactcgtcacgttgactagtacatgaccacttga

SEQ ID NO: 50447 - DNA, 53 bp, Artificial Sequence; identical to SEQ ID NO: 46560
  Description of Artificial Sequence: Synthetic casein; inner sequence and 3' sequence

SEQ ID NO: 50448 - DNA, 53 bp, Artificial Sequence; identical to SEQ ID NO: 6653
  Description of Artificial Sequence: Synthetic casein; inner sequence and 3' sequence

SEQ ID NO: 50449 - DNA, 53 bp, Artificial Sequence
  Description of Artificial Sequence: Synthetic casein; inner sequence and 3' sequence
cgtcacgcagtacgttcgcattacgtcacattgactagtacatgaccacttga

SEQ ID NO: 50450 - DNA, 53 bp, Artificial Sequence; identical to SEQ ID NO: 2661
  Description of Artificial Sequence: Synthetic casein; inner sequence and 3' sequence

SEQ ID NO: 50451 - DNA, 53 bp, Artificial Sequence; identical to SEQ ID NO: 2173
  Description of Artificial Sequence: Synthetic casein; inner sequence and 3' sequence

SEQ ID NO: 50452 - DNA, 53 bp, Artificial Sequence; identical to SEQ ID NO: 18457
  Description of Artificial Sequence: Synthetic casein; inner sequence and 3' sequence

SEQ ID NO: 50453 - DNA, 53 bp, Artificial Sequence; identical to SEQ ID NO: 2247
  Description of Artificial Sequence: Synthetic casein; inner sequence and 3' sequence

SEQ ID NO: 50454 - DNA, 53 bp, Artificial Sequence; identical to SEQ ID NO: 46565
  Description of Artificial Sequence: Synthetic casein; inner sequence and 3' sequence

SEQ ID NO: 50455 - DNA, 53 bp, Artificial Sequence
  Description of Artificial Sequence: Synthetic casein; inner sequence and 3' sequence
cgtaacgcgcatcgtacgtgtgacgcatcgttgactagtacatgaccacttga

SEQ ID NO: 50456 - DNA, 53 bp, Artificial Sequence
  Description of Artificial Sequence: Synthetic casein; inner sequence and 3' sequence
gcgttacggtgcatgacgccttccgacacgttgactagtacatgaccacttga

SEQ ID NO: 50457 - DNA, 53 bp, Artificial Sequence; identical to SEQ ID NO: 6543
  Description of Artificial Sequence: Synthetic casein; inner sequence and 3' sequence

SEQ ID NO: 50458 - DNA, 53 bp, Artificial Sequence
  Description of Artificial Sequence: Synthetic casein; inner sequence and 3' sequence
gcgatgcgcgttacgtacgacatcgacacgttgactagtacatgaccacttga

SEQ ID NO: 50459 - DNA, 53 bp, Artificial Sequence; identical to SEQ ID NO: 14743
  Description of Artificial Sequence: Synthetic casein; inner sequence and 3' sequence

SEQ ID NO: 50460 - DNA, 53 bp, Artificial Sequence
  Description of Artificial Sequence: Synthetic casein; inner sequence and 3' sequence
gcgtgaggcaacgtagcgtacgtcgtcgcattgactagtacatgaccacttga

SEQ ID NO: 50461 - DNA, 53 bp, Artificial Sequence; identical to SEQ ID NO: 18769
  Description of Artificial Sequence: Synthetic casein; inner sequence and 3' sequence

SEQ ID NO: 50462 - DNA, 53 bp, Artificial Sequence; identical to SEQ ID NO: 22496
  Description of Artificial Sequence: Synthetic casein; inner sequence and 3' sequence

SEQ ID NO: 50463 - DNA, 53 bp, Artificial Sequence; identical to SEQ ID NO: 6924
  Description of Artificial Sequence: Synthetic casein; inner sequence and 3' sequence

SEQ ID NO: 50464 - DNA, 53 bp, Artificial Sequence
  Description of Artificial Sequence: Synthetic casein; inner sequence and 3' sequence
gctgtggcagtacgtatgccctgcgtcacgttgactagtacatgaccacttga

SEQ ID NO: 50465 - DNA, 53 bp, Artificial Sequence; identical to SEQ ID NO: 2219
  Description of Artificial Sequence: Synthetic casein; inner sequence and 3' sequence

SEQ ID NO: 50466 - DNA, 53 bp, Artificial Sequence
  Description of Artificial Sequence: Synthetic casein; inner sequence and 3' sequence
acgtcacacgctgcgtaacgacacgtcacattgactagtacatgaccacttga

SEQ ID NO: 50467 - DNA, 53 bp, Artificial Sequence; identical to SEQ ID NO: 7002
  Description of Artificial Sequence: Synthetic casein; inner sequence and 3' sequence

SEQ ID NO: 50468 - DNA, 53 bp, Artificial Sequence
  Description of Artificial Sequence: Synthetic casein; inner sequence and 3' sequence
gcactgcacgcaccctatcatggcggcatgttgactagtacatgaccacttga

SEQ ID NO: 50469 - DNA, 53 bp, Artificial Sequence; identical to SEQ ID NO: 18612
  Description of Artificial Sequence: Synthetic casein; inner sequence and 3' sequence

SEQ ID NO: 50470 - DNA, 53 bp, Artificial Sequence; identical to SEQ ID NO: 30668
  Description of Artificial Sequence: Synthetic casein; inner sequence and 3' sequence

SEQ ID NO: 50471 - DNA, 53 bp, Artificial Sequence; identical to SEQ ID NO: 18718
  Description of Artificial Sequence: Synthetic casein; inner sequence and 3' sequence

SEQ ID NO: 50472 - DNA, 53 bp, Artificial Sequence; identical to SEQ ID NO: 2229
  Description of Artificial Sequence: Synthetic casein; inner sequence and 3' sequence

SEQ ID NO: 50473 - DNA, 53 bp, Artificial Sequence; identical to SEQ ID NO: 22683
  Description of Artificial Sequence: Synthetic casein; inner sequence and 3' sequence

SEQ ID NO: 50474 - DNA, 53 bp, Artificial Sequence; identical to SEQ ID NO: 2076
  Description of Artificial Sequence: Synthetic casein; inner sequence and 3' sequence

SEQ ID NO: 50475 - DNA, 53 bp, Artificial Sequence; identical to SEQ ID NO: 46425
  Description of Artificial Sequence: Synthetic casein; inner sequence and 3' sequence

SEQ ID NO: 50476 - DNA, 53 bp, Artificial Sequence; identical to SEQ ID NO: 30584
  Description of Artificial Sequence: Synthetic casein; inner sequence and 3' sequence

SEQ ID NO: 50477 - DNA, 53 bp, Artificial Sequence; identical to SEQ ID NO: 18709
  Description of Artificial Sequence: Synthetic casein; inner sequence and 3' sequence

SEQ ID NO: 50478 - DNA, 53 bp, Artificial Sequence; identical to SEQ ID NO: 46426
  Description of Artificial Sequence: Synthetic casein; inner sequence and 3' sequence

SEQ ID NO: 50479 - DNA, 53 bp, Artificial Sequence; identical to SEQ ID NO: 22880
  Description of Artificial Sequence: Synthetic casein; inner sequence and 3' sequence

SEQ ID NO: 50480 - DNA, 53 bp, Artificial Sequence
  Description of Artificial Sequence: Synthetic casein; inner sequence and 3' sequence
gtcacgcgatgcatggtacgttgcgacacgttgactagtacatgaccacttga

SEQ ID NO: 50481 - DNA, 51 bp, Artificial Sequence; identical to SEQ ID NO: 18802
  Description of Artificial Sequence: Synthetic casein; inner sequence and 3' sequence

SEQ ID NO: 50482 - DNA, 53 bp, Artificial Sequence
  Description of Artificial Sequence: Synthetic casein; inner sequence and 3' sequence
gcatatcgcacagtacgtcactgcgtcacgttgactagtacatgaccacttga

SEQ ID NO: 50483 - DNA, 53 bp, Artificial Sequence; identical to SEQ ID NO: 46894
  Description of Artificial Sequence: Synthetic casein; inner sequence and 3' sequence

SEQ ID NO: 50484 - DNA, 53 bp, Artificial Sequence; identical to SEQ ID NO: 18988
  Description of Artificial Sequence: Synthetic casein; inner sequence and 3' sequence

SEQ ID NO: 50485 - DNA, 53 bp, Artificial Sequence; identical to SEQ ID NO: 46651
  Description of Artificial Sequence: Synthetic casein; inner sequence and 3' sequence

SEQ ID NO: 50486 - DNA, 53 bp, Artificial Sequence
  Description of Artificial Sequence: Synthetic casein; inner sequence and 3' sequence
gcgtcgtaacgtcacgtccgtcgctacacgttgactagtacatgaccacttga

SEQ ID NO: 50487 - DNA, 53 bp, Artificial Sequence; identical to SEQ ID NO: 2136
  Description of Artificial Sequence: Synthetic casein; inner sequence and 3' sequence

SEQ ID NO: 50488 - DNA, 53 bp, Artificial Sequence; identical to SEQ ID NO: 46627
  Description of Artificial Sequence: Synthetic casein; inner sequence and 3' sequence

SEQ ID NO: 50489 - DNA, 53 bp, Artificial Sequence; identical to SEQ ID NO: 46470
  Description of Artificial Sequence: Synthetic casein; inner sequence and 3' sequence

SEQ ID NO: 50490 - DNA, 53 bp, Artificial Sequence
  Description of Artificial Sequence: Synthetic casein; inner sequence and 3' sequence
gcataccgtgtgtgcgtcggtccgtacgcgttgactagtacatgaccacttga

SEQ ID NO: 50491 - DNA, 53 bp, Artificial Sequence; identical to SEQ ID NO: 2507
  Description of Artificial Sequence: Synthetic casein; inner sequence and 3' sequence

SEQ ID NO: 50492 - DNA, 53 bp, Artificial Sequence; identical to SEQ ID NO: 18651
  Description of Artificial Sequence: Synthetic casein; inner sequence and 3' sequence

SEQ ID NO: 50493 - DNA, 53 bp, Artificial Sequence; identical to SEQ ID NO: 2242
  Description of Artificial Sequence: Synthetic casein; inner sequence and 3' sequence

SEQ ID NO: 50494 - DNA, 53 bp, Artificial Sequence; identical to SEQ ID NO: 22530
  Description of Artificial Sequence: Synthetic casein; inner sequence and 3' sequence

SEQ ID NO: 50495 - DNA, 53 bp, Artificial Sequence; identical to SEQ ID NO: 2277
  Description of Artificial Sequence: Synthetic casein; inner sequence and 3' sequence

SEQ ID NO: 50496 - DNA, 53 bp, Artificial Sequence; identical to SEQ ID NO: 22580
  Description of Artificial Sequence: Synthetic casein; inner sequence and 3' sequence

SEQ ID NO: 50497 - DNA, 53 bp, Artificial Sequence; identical to SEQ ID NO: 2217
  Description of Artificial Sequence: Synthetic casein; inner sequence and 3' sequence

SEQ ID NO: 50498 - DNA, 53 bp, Artificial Sequence; identical to SEQ ID NO: 6988
  Description of Artificial Sequence: Synthetic casein; inner sequence and 3' sequence

SEQ ID NO: 50499 - DNA, 53 bp, Artificial Sequence; identical to SEQ ID NO: 46853
  Description of Artificial Sequence: Synthetic casein; inner sequence and 3' sequence

SEQ ID NO: 50500 - DNA, 53 bp, Artificial Sequence; identical to SEQ ID NO: 18829
  Description of Artificial Sequence: Synthetic casein; inner sequence and 3' sequence

SEQ ID NO: 50501 - DNA, 53 bp, Artificial Sequence; identical to SEQ ID NO: 34505
  Description of Artificial Sequence: Synthetic casein; inner sequence and 3' sequence

SEQ ID NO: 50502 - DNA, 53 bp, Artificial Sequence; identical to SEQ ID NO: 30814
  Description of Artificial Sequence: Synthetic casein; inner sequence and 3' sequence

SEQ ID NO: 50503 - DNA, 53 bp, Artificial Sequence; identical to SEQ ID NO: 22903
  Description of Artificial Sequence: Synthetic casein; inner sequence and 3' sequence

SEQ ID NO: 50504 - DNA, 53 bp, Artificial Sequence
  Description of Artificial Sequence: Synthetic casein; inner sequence and 3' sequence
gcgatgcacgtcaacactacgtccttcacgttgactagtacatgaccacttga

SEQ ID NO: 50505 - DNA, 53 bp, Artificial Sequence; identical to SEQ ID NO: 46966
  Description of Artificial Sequence: Synthetic casein; inner sequence and 3' sequence

SEQ ID NO: 50506 - DNA, 53 bp, Artificial Sequence; identical to SEQ ID NO: 18892
  Description of Artificial Sequence: Synthetic casein; inner sequence and 3' sequence

SEQ ID NO: 50507 - DNA, 53 bp, Artificial Sequence
  Description of Artificial Sequence: Synthetic casein; inner sequence and 3' sequence
gcgatacgcaaggacggcatgacctacgcattgactagtacatgaccacttga

SEQ ID NO: 50508 - DNA, 53 bp, Artificial Sequence
  Description of Artificial Sequence: Synthetic casein; inner sequence and 3' sequence
gtgcgtcacgttcccatcatgtacgacacgttgactagtacatgaccacttga

SEQ ID NO: 50509 - DNA, 53 bp, Artificial Sequence; identical to SEQ ID NO: 46751
  Description of Artificial Sequence: Synthetic casein; inner sequence and 3' sequence

SEQ ID NO: 50510 - DNA, 53 bp, Artificial Sequence; identical to SEQ ID NO: 30806
  Description of Artificial Sequence: Synthetic casein; inner sequence and 3' sequence

SEQ ID NO: 50511 - DNA, 53 bp, Artificial Sequence; identical to SEQ ID NO: 30984
  Description of Artificial Sequence: Synthetic casein; inner sequence and 3' sequence

SEQ ID NO: 50512 - DNA, 53 bp, Artificial Sequence; identical to SEQ ID NO: 2407
  Description of Artificial Sequence: Synthetic casein; inner sequence and 3' sequence

SEQ ID NO: 50513 - DNA, 53 bp, Artificial Sequence; identical to SEQ ID NO: 22972
  Description of Artificial Sequence: Synthetic casein; inner sequence and 3' sequence

SEQ ID NO: 50514 - DNA, 53 bp, Artificial Sequence; identical to SEQ ID NO: 6603
  Description of Artificial Sequence: Synthetic casein; inner sequence and 3' sequence

SEQ ID NO: 50515 - DNA, 53 bp, Artificial Sequence; identical to SEQ ID NO: 2398
  Description of Artificial Sequence: Synthetic casein; inner sequence and 3' sequence

SEQ ID NO: 50516 - DNA, 53 bp, Artificial Sequence; identical to SEQ ID NO: 6420
  Description of Artificial Sequence: Synthetic casein; inner sequence and 3' sequence

SEQ ID NO: 50517 - DNA, 52 bp, Artificial Sequence; identical to SEQ ID NO: 46766
  Description of Artificial Sequence: Synthetic casein; inner sequence and 3' sequence

SEQ ID NO: 50518 - DNA, 53 bp, Artificial Sequence
  Description of Artificial Sequence: Synthetic casein; inner sequence and 3' sequence
cgtgacgcatgtgaggcatcgtgtgtcgcgttgactagtacatgaccacttga

SEQ ID NO: 50519 - DNA, 53 bp, Artificial Sequence; identical to SEQ ID NO: 46312
  Description of Artificial Sequence: Synthetic casein; inner sequence and 3' sequence

SEQ ID NO: 50520 - DNA, 53 bp, Artificial Sequence; identical to SEQ ID NO: 2317
  Description of Artificial Sequence: Synthetic casein; inner sequence and 3' sequence

SEQ ID NO: 50521 - DNA, 53 bp, Artificial Sequence
  Description of Artificial Sequence: Synthetic casein; inner sequence and 3' sequence
gcatgtgacgacgatgtgccgtgatgcatgttgactagtacatgaccacttga

SEQ ID NO: 50522 - DNA, 53 bp, Artificial Sequence; identical to SEQ ID NO: 46752
  Description of Artificial Sequence: Synthetic casein; inner sequence and 3' sequence

SEQ ID NO: 50523 - DNA, 53 bp, Artificial Sequence; identical to SEQ ID NO: 2142
  Description of Artificial Sequence: Synthetic casein; inner sequence and 3' sequence

SEQ ID NO: 50524 - DNA, 53 bp, Artificial Sequence; identical to SEQ ID NO: 30670
  Description of Artificial Sequence: Synthetic casein; inner sequence and 3' sequence

SEQ ID NO: 50525 - DNA, 53 bp, Artificial Sequence; identical to SEQ ID NO: 30753
  Description of Artificial Sequence: Synthetic casein; inner sequence and 3' sequence

SEQ ID NO: 50526 - DNA, 53 bp, Artificial Sequence; identical to SEQ ID NO: 30741
  Description of Artificial Sequence: Synthetic casein; inner sequence and 3' sequence

SEQ ID NO: 50527 - DNA, 53 bp, Artificial Sequence; identical to SEQ ID NO: 14821
  Description of Artificial Sequence: Synthetic casein; inner sequence and 3' sequence

SEQ ID NO: 50528 - DNA, 53 bp, Artificial Sequence; identical to SEQ ID NO: 2369
  Description of Artificial Sequence: Synthetic casein; inner sequence and 3' sequence

SEQ ID NO: 50529 - DNA, 53 bp, Artificial Sequence; identical to SEQ ID NO: 22817
  Description of Artificial Sequence: Synthetic casein; inner sequence and 3' sequence

SEQ ID NO: 50530 - DNA, 53 bp, Artificial Sequence; identical to SEQ ID NO: 2032
  Description of Artificial Sequence: Synthetic casein; inner sequence and 3' sequence

SEQ ID NO: 50531 - DNA, 53 bp, Artificial Sequence
  Description of Artificial Sequence: Synthetic casein; inner sequence and 3' sequence
gcgtcacggtgatgcgttgtgctgttcgtgttgactagtacatgaccacttga

SEQ ID NO: 50532 - DNA, 53 bp, Artificial Sequence; identical to SEQ ID NO: 2420
  Description of Artificial Sequence: Synthetic casein; inner sequence and 3' sequence

SEQ ID NO: 50533 - DNA, 53 bp, Artificial Sequence; identical to SEQ ID NO: 30980
  Description of Artificial Sequence: Synthetic casein; inner sequence and 3' sequence

SEQ ID NO: 50534 - DNA, 53 bp, Artificial Sequence; identical to SEQ ID NO: 18688
  Description of Artificial Sequence: Synthetic casein; inner sequence and 3' sequence

SEQ ID NO: 50535 - DNA, 53 bp, Artificial Sequence; identical to SEQ ID NO: 2583
  Description of Artificial Sequence: Synthetic casein; inner sequence and 3' sequence

SEQ ID NO: 50536 - DNA, 53 bp, Artificial Sequence; identical to SEQ ID NO: 30412
  Description of Artificial Sequence: Synthetic casein; inner sequence and 3' sequence

SEQ ID NO: 50537 - DNA, 53 bp, Artificial Sequence; identical to SEQ ID NO: 10953
  Description of Artificial Sequence: Synthetic casein; inner sequence and 3' sequence

SEQ ID NO: 50538 - DNA, 53 bp, Artificial Sequence; identical to SEQ ID NO: 46841
  Description of Artificial Sequence: Synthetic casein; inner sequence and 3' sequence

SEQ ID NO: 50539 - DNA, 53 bp, Artificial Sequence; identical to SEQ ID NO: 46412
  Description of Artificial Sequence: Synthetic casein; inner sequence and 3' sequence

SEQ ID NO: 50540 - DNA, 53 bp, Artificial Sequence; identical to SEQ ID NO: 6356
  Description of Artificial Sequence: Synthetic casein; inner sequence and 3' sequence

SEQ ID NO: 50541 - DNA, 53 bp, Artificial Sequence; identical to SEQ ID NO: 10938
  Description of Artificial Sequence: Synthetic casein; inner sequence and 3' sequence

SEQ ID NO: 50542 - DNA, 53 bp, Artificial Sequence; identical to SEQ ID NO: 46781
  Description of Artificial Sequence: Synthetic casein; inner sequence and 3' sequence

SEQ ID NO: 50543 - DNA, 53 bp, Artificial Sequence; identical to SEQ ID NO: 2223
  Description of Artificial Sequence: Synthetic casein; inner sequence and 3' sequence

SEQ ID NO: 50544 - DNA, 53 bp, Artificial Sequence; identical to SEQ ID NO: 46838
  Description of Artificial Sequence: Synthetic casein; inner sequence and 3' sequence

SEQ ID NO: 50545 - DNA, 51 bp, Artificial Sequence; identical to SEQ ID NO: 2148
  Description of Artificial Sequence: Synthetic casein; inner sequence and 3' sequence

SEQ ID NO: 50546 - DNA, 53 bp, Artificial Sequence; identical to SEQ ID NO: 22960
  Description of Artificial Sequence: Synthetic casein; inner sequence and 3' sequence

SEQ ID NO: 50547 - DNA, 53 bp, Artificial Sequence; identical to SEQ ID NO: 46597
  Description of Artificial Sequence: Synthetic casein; inner sequence and 3' sequence

SEQ ID NO: 50548 - DNA, 53 bp, Artificial Sequence; identical to SEQ ID NO: 22426
  Description of Artificial Sequence: Synthetic casein; inner sequence and 3' sequence

SEQ ID NO: 50549 - DNA, 53 bp, Artificial Sequence; identical to SEQ ID NO: 2072
  Description of Artificial Sequence: Synthetic casein; inner sequence and 3' sequence

SEQ ID NO: 50550 - DNA, 53 bp, Artificial Sequence; identical to SEQ ID NO: 6748
  Description of Artificial Sequence: Synthetic casein; inner sequence and 3' sequence

SEQ ID NO: 50551 - DNA, 53 bp, Artificial Sequence; identical to SEQ ID NO: 2805
  Description of Artificial Sequence: Synthetic casein; inner sequence and 3' sequence

SEQ ID NO: 50552 - DNA, 53 bp, Artificial Sequence; identical to SEQ ID NO: 46595
  Description of Artificial Sequence: Synthetic casein; inner sequence and 3' sequence

SEQ ID NO: 50553 - DNA, 53 bp, Artificial Sequence; identical to SEQ ID NO: 46422
  Description of Artificial Sequence: Synthetic casein; inner sequence and 3' sequence

SEQ ID NO: 50554 - DNA, 53 bp, Artificial Sequence; identical to SEQ ID NO: 46527
  Description of Artificial Sequence: Synthetic casein; inner sequence and 3' sequence

SEQ ID NO: 50555 - DNA, 53 bp, Artificial Sequence; identical to SEQ ID NO: 19001
  Description of Artificial Sequence: Synthetic casein; inner sequence and 3' sequence

SEQ ID NO: 50556 - DNA, 53 bp, Artificial Sequence; identical to SEQ ID NO: 2110
  Description of Artificial Sequence: Synthetic casein; inner sequence and 3' sequence

SEQ ID NO: 50557 - DNA, 53 bp, Artificial Sequence
  Description of Artificial Sequence: Synthetic casein; inner sequence and 3' sequence
gcgacatcgtagcatggtccttgctgcacgttgactagtacatgaccacttga

SEQ ID NO: 50558 - DNA, 53 bp, Artificial Sequence; identical to SEQ ID NO: 6890
  Description of Artificial Sequence: Synthetic casein; inner sequence and 3' sequence

SEQ ID NO: 50559 - DNA, 53 bp, Artificial Sequence; identical to SEQ ID NO: 46910
  Description of Artificial Sequence: Synthetic casein; inner sequence and 3' sequence

SEQ ID NO: 50560 - DNA, 53 bp, Artificial Sequence; identical to SEQ ID NO: 46704
  Description of Artificial Sequence: Synthetic casein; inner sequence and 3' sequence

SEQ ID NO: 50561 - DNA, 52 bp, Artificial Sequence
  Description of Artificial Sequence: Synthetic casein; inner sequence and 3' sequence
ggacgcagcgaaccgtacgtggacgtgcattgactagtacatgaccacttga

SEQ ID NO: 50562 - DNA, 53 bp, Artificial Sequence; identical to SEQ ID NO: 2205
  Description of Artificial Sequence: Synthetic casein; inner sequence and 3' sequence

SEQ ID NO: 50563 - DNA, 53 bp, Artificial Sequence; identical to SEQ ID NO: 22596
  Description of Artificial Sequence: Synthetic casein; inner sequence and 3' sequence

SEQ ID NO: 50564 - DNA, 53 bp, Artificial Sequence; identical to SEQ ID NO: 2086
  Description of Artificial Sequence: Synthetic casein; inner sequence and 3' sequence

SEQ ID NO: 50565 - DNA, 53 bp, Artificial Sequence
  Description of Artificial Sequence: Synthetic casein; inner sequence and 3' sequence
gcatgtcgtgcgatgtcgttgtgctgcacgttgactagtacatgaccacttga

SEQ ID NO: 50566 - DNA, 53 bp, Artificial Sequence; identical to SEQ ID NO: 2678
  Description of Artificial Sequence: Synthetic casein; inner sequence and 3' sequence

SEQ ID NO: 50567 - DNA, 51 bp, Artificial Sequence
  Description of Artificial Sequence: Synthetic casein; inner sequence and 3' sequence
ggccgcaacgtaccgtatcgtggccatgttgactagtacatgaccacttga

SEQ ID NO: 50568 - DNA, 53 bp, Artificial Sequence
  Description of Artificial Sequence: Synthetic casein; inner sequence and 3' sequence
cgtacgcaagggcacggtacgtacgacacgttgactagtacatgaccacttga

SEQ ID NO: 50569 - DNA, 53 bp, Artificial Sequence; identical to SEQ ID NO: 18748
  Description of Artificial Sequence: Synthetic casein; inner sequence and 3' sequence

SEQ ID NO: 50570 - DNA, 53 bp, Artificial Sequence; identical to SEQ ID NO: 6987
  Description of Artificial Sequence: Synthetic casein; inner sequence and 3' sequence

SEQ ID NO: 50571 - DNA, 53 bp, Artificial Sequence
  Description of Artificial Sequence: Synthetic casein; inner sequence and 3' sequence
ggcattcgatgaacgaggcatgatgcgtcattgactagtacatgaccacttga

SEQ ID NO: 50572 - DNA, 53 bp, Artificial Sequence; identical to SEQ ID NO: 6802
  Description of Artificial Sequence: Synthetic casein; inner sequence and 3' sequence

SEQ ID NO: 50573 - DNA, 53 bp, Artificial Sequence; identical to SEQ ID NO: 30563
  Description of Artificial Sequence: Synthetic casein; inner sequence and 3' sequence

SEQ ID NO: 50574 - DNA, 53 bp, Artificial Sequence; identical to SEQ ID NO: 2034
  Description of Artificial Sequence: Synthetic casein; inner sequence and 3' sequence

SEQ ID NO: 50575 - DNA, 53 bp, Artificial Sequence; identical to SEQ ID NO: 2521
  Description of Artificial Sequence: Synthetic casein; inner sequence and 3' sequence

SEQ ID NO: 50576 - DNA, 53 bp, Artificial Sequence; identical to SEQ ID NO: 30979
  Description of Artificial Sequence: Synthetic casein; inner sequence and 3' sequence

SEQ ID NO: 50577 - DNA, 53 bp, Artificial Sequence; identical to SEQ ID NO: 2551
  Description of Artificial Sequence: Synthetic casein; inner sequence and 3' sequence

SEQ ID NO: 50578 - DNA, 53 bp, Artificial Sequence; identical to SEQ ID NO: 46674
  Description of Artificial Sequence: Synthetic casein; inner sequence and 3' sequence

SEQ ID NO: 50579 - DNA, 53 bp, Artificial Sequence; identical to SEQ ID NO: 46972
  Description of Artificial Sequence: Synthetic casein; inner sequence and 3' sequence

SEQ ID NO: 50580 - DNA, 53 bp, Artificial Sequence; identical to SEQ ID NO: 38797
  Description of Artificial Sequence: Synthetic casein; inner sequence and 3' sequence

SEQ ID NO: 50581 - DNA, 53 bp, Artificial Sequence; identical to SEQ ID NO: 46555
  Description of Artificial Sequence: Synthetic casein; inner sequence and 3' sequence

SEQ ID NO: 50582 - DNA, 53 bp, Artificial Sequence; identical to SEQ ID NO: 46596
  Description of Artificial Sequence: Synthetic casein; inner sequence and 3' sequence

SEQ ID NO: 50583 - DNA, 53 bp, Artificial Sequence; identical to SEQ ID NO: 6882
  Description of Artificial Sequence: Synthetic casein; inner sequence and 3' sequence

SEQ ID NO: 50584 - DNA, 53 bp, Artificial Sequence; identical to SEQ ID NO: 14958
  Description of Artificial Sequence: Synthetic casein; inner sequence and 3' sequence

SEQ ID NO: 50585 - DNA, 53 bp, Artificial Sequence; identical to SEQ ID NO: 2065
  Description of Artificial Sequence: Synthetic casein; inner sequence and 3' sequence

SEQ ID NO: 50586 - DNA, 53 bp, Artificial Sequence; identical to SEQ ID NO: 46549
  Description of Artificial Sequence: Synthetic casein; inner sequence and 3' sequence

SEQ ID NO: 50587 - DNA, 53 bp, Artificial Sequence
  Description of Artificial Sequence: Synthetic casein; inner sequence and 3' sequence
gcatcgcatgcgtcacgtcctcaccgtgccttgactagtacatgaccacttga

SEQ ID NO: 50588 - DNA, 53 bp, Artificial Sequence; identical to SEQ ID NO: 2057
  Description of Artificial Sequence: Synthetic casein; inner sequence and 3' sequence

SEQ ID NO: 50589 - DNA, 53 bp, Artificial Sequence; identical to SEQ ID NO: 46843
  Description of Artificial Sequence: Synthetic casein; inner sequence and 3' sequence

SEQ ID NO: 50590 - DNA, 53 bp, Artificial Sequence; identical to SEQ ID NO: 46662
  Description of Artificial Sequence: Synthetic casein; inner sequence and 3' sequence

SEQ ID NO: 50591 - DNA, 53 bp, Artificial Sequence; identical to SEQ ID NO: 30705
  Description of Artificial Sequence: Synthetic casein; inner sequence and 3' sequence

SEQ ID NO: 50592 - DNA, 53 bp, Artificial Sequence; identical to SEQ ID NO: 6272
  Description of Artificial Sequence: Synthetic casein; inner sequence and 3' sequence

SEQ ID NO: 50593 - DNA, 53 bp, Artificial Sequence
  Description of Artificial Sequence: Synthetic casein; inner sequence and 3' sequence
gcgtacacgtcacacgcatgccacgtcacgttgactagtacatgaccacttga

SEQ ID NO: 50594 - DNA, 53 bp, Artificial Sequence; identical to SEQ ID NO: 22666
  Description of Artificial Sequence: Synthetic casein; inner sequence and 3' sequence

SEQ ID NO: 50595 - DNA, 53 bp, Artificial Sequence; identical to SEQ ID NO: 46939
  Description of Artificial Sequence: Synthetic casein; inner sequence and 3' sequence

SEQ ID NO: 50596 - DNA, 53 bp, Artificial Sequence
  Description of Artificial Sequence: Synthetic casein; inner sequence and 3' sequence
gcgtgatggcgtaacgtccgacactgcacattgactagtacatgaccacttga

SEQ ID NO: 50597 - DNA, 53 bp, Artificial Sequence
  Description of Artificial Sequence: Synthetic casein; inner sequence and 3' sequence
gcgtacggcacgacgatgatgcactacgtgttgactagtacatgaccacttga

SEQ ID NO: 50598 - DNA, 53 bp, Artificial Sequence; identical to SEQ ID NO: 2331
  Description of Artificial Sequence: Synthetic casein; inner sequence and 3' sequence

SEQ ID NO: 50599 - DNA, 53 bp, Artificial Sequence; identical to SEQ ID NO: 46620
  Description of Artificial Sequence: Synthetic casein; inner sequence and 3' sequence

SEQ ID NO: 50600 - DNA, 53 bp, Artificial Sequence; identical to SEQ ID NO: 14892
  Description of Artificial Sequence: Synthetic casein; inner sequence and 3' sequence

SEQ ID NO: 50601 - DNA, 53 bp, Artificial Sequence; identical to SEQ ID NO: 22661
  Description of Artificial Sequence: Synthetic casein; inner sequence and 3' sequence

SEQ ID NO: 50602 - DNA, 53 bp, Artificial Sequence; identical to SEQ ID NO: 2452
  Description of Artificial Sequence: Synthetic casein; inner sequence and 3' sequence

SEQ ID NO: 50603 - DNA, 53 bp, Artificial Sequence; identical to SEQ ID NO: 2406
  Description of Artificial Sequence: Synthetic casein; inner sequence and 3' sequence

SEQ ID NO: 50604 - DNA, 48 bp, Artificial Sequence; identical to SEQ ID NO: 22136
  Description of Artificial Sequence: Synthetic casein; inner sequence and 3' sequence

SEQ ID NO: 50605 - DNA, 53 bp, Artificial Sequence; identical to SEQ ID NO: 46552
  Description of Artificial Sequence: Synthetic casein; inner sequence and 3' sequence

SEQ ID NO: 50606 - DNA, 53 bp, Artificial Sequence; identical to SEQ ID NO: 46668
  Description of Artificial Sequence: Synthetic casein; inner sequence and 3' sequence

SEQ ID NO: 50607 - DNA, 53 bp, Artificial Sequence; identical to SEQ ID NO: 30737
  Description of Artificial Sequence: Synthetic casein; inner sequence and 3' sequence

SEQ ID NO: 50608 - DNA, 53 bp, Artificial Sequence
  Description of Artificial Sequence: Synthetic casein; inner sequence and 3' sequence
caacgcaacgcatggtgacgtattgccgtgttgactagtacatgaccacttga

SEQ ID NO: 50609 - DNA, 53 bp, Artificial Sequence; identical to SEQ ID NO: 34193
  Description of Artificial Sequence: Synthetic casein; inner sequence and 3' sequence

SEQ ID NO: 50610 - DNA, 53 bp, Artificial Sequence; identical to SEQ ID NO: 18605
  Description of Artificial Sequence: Synthetic casein; inner sequence and 3' sequence

SEQ ID NO: 50611 - DNA, 53 bp, Artificial Sequence; identical to SEQ ID NO: 46768
  Description of Artificial Sequence: Synthetic casein; inner sequence and 3' sequence

SEQ ID NO: 50612 - DNA, 53 bp, Artificial Sequence
  Description of Artificial Sequence: Synthetic casein; inner sequence and 3' sequence
gtcatgcacgcaccctatcatgtaggcatgttgactagtacatgaccacttga

SEQ ID NO: 50613 - DNA, 53 bp, Artificial Sequence
  Description of Artificial Sequence: Synthetic casein; inner sequence and 3' sequence
cgaacgcacactgcacgccactacgtcacgttgactagtacatgaccacttga

SEQ ID NO: 50614 - DNA, 53 bp, Artificial Sequence; identical to SEQ ID NO: 2477
  Description of Artificial Sequence: Synthetic casein; inner sequence and 3' sequence

SEQ ID NO: 50615 - DNA, 53 bp, Artificial Sequence; identical to SEQ ID NO: 46711
  Description of Artificial Sequence: Synthetic casein; inner sequence and 3' sequence

SEQ ID NO: 50616 - DNA, 51 bp, Artificial Sequence
  Description of Artificial Sequence: Synthetic casein; inner sequence and 3' sequence
ggacgcaacgcaccgtatcgtggccatgttgactagtacatgaccacttga

SEQ ID NO: 50617 - DNA, 53 bp, Artificial Sequence; identical to SEQ ID NO: 22515
  Description of Artificial Sequence: Synthetic casein; inner sequence and 3' sequence

SEQ ID NO: 50618 - DNA, 53 bp, Artificial Sequence; identical to SEQ ID NO: 30791
  Description of Artificial Sequence: Synthetic casein; inner sequence and 3' sequence

SEQ ID NO: 50619 - DNA, 53 bp, Artificial Sequence; identical to SEQ ID NO: 22286
  Description of Artificial Sequence: Synthetic casein; inner sequence and 3' sequence

SEQ ID NO: 50620 - DNA, 53 bp, Artificial Sequence; identical to SEQ ID NO: 2132
  Description of Artificial Sequence: Synthetic casein; inner sequence and 3' sequence

SEQ ID NO: 50621 - DNA, 53 bp, Artificial Sequence; identical to SEQ ID NO: 22982
  Description of Artificial Sequence: Synthetic casein; inner sequence and 3' sequence

SEQ ID NO: 50622 - DNA, 53 bp, Artificial Sequence
  Description of Artificial Sequence: Synthetic casein; inner sequence and 3' sequence
cgtaccgcaggcatacgtgacgtcaacgcattgactagtacatgaccacttga

SEQ ID NO: 50623 - DNA, 53 bp, Artificial Sequence; identical to SEQ ID NO: 10798
  Description of Artificial Sequence: Synthetic casein; inner sequence and 3' sequence

SEQ ID NO: 50624 - DNA, 53 bp, Artificial Sequence; identical to SEQ ID NO: 22793
  Description of Artificial Sequence: Synthetic casein; inner sequence and 3' sequence

SEQ ID NO: 50625 - DNA, 53 bp, Artificial Sequence; identical to SEQ ID NO: 2324
  Description of Artificial Sequence: Synthetic casein; inner sequence and 3' sequence

SEQ ID NO: 50626 - DNA, 53 bp, Artificial Sequence; identical to SEQ ID NO: 46903
  Description of Artificial Sequence: Synthetic casein; inner sequence and 3' sequence

SEQ ID NO: 50627 - DNA, 53 bp, Artificial Sequence; identical to SEQ ID NO: 22576
  Description of Artificial Sequence: Synthetic casein; inner sequence and 3' sequence

SEQ ID NO: 50628 - DNA, 53 bp, Artificial Sequence; identical to SEQ ID NO: 46249
  Description of Artificial Sequence: Synthetic casein; inner sequence and 3' sequence

SEQ ID NO: 50629 - DNA, 53 bp, Artificial Sequence; identical to SEQ ID NO: 18744
  Description of Artificial Sequence: Synthetic casein; inner sequence and 3' sequence

SEQ ID NO: 50630 - DNA, 53 bp, Artificial Sequence
  Description of Artificial Sequence: Synthetic casein; inner sequence and 3' sequence
gtcgcgatgaccgtcagtacgcacgtcagcttgactagtacatgaccacttga

SEQ ID NO: 50631 - DNA, 53 bp, Artificial Sequence; identical to SEQ ID NO: 2171
  Description of Artificial Sequence: Synthetic casein; inner sequence and 3' sequence

SEQ ID NO: 50632 - DNA, 53 bp, Artificial Sequence; identical to SEQ ID NO: 30307
  Description of Artificial Sequence: Synthetic casein; inner sequence and 3' sequence

SEQ ID NO: 50633 - DNA, 53 bp, Artificial Sequence; identical to SEQ ID NO: 30844
  Description of Artificial Sequence: Synthetic casein; inner sequence and 3' sequence

SEQ ID NO: 50634 - DNA, 53 bp, Artificial Sequence; identical to SEQ ID NO: 14985
  Description of Artificial Sequence: Synthetic casein; inner sequence and 3' sequence

SEQ ID NO: 50635 - DNA, 53 bp, Artificial Sequence; identical to SEQ ID NO: 30704
  Description of Artificial Sequence: Synthetic casein; inner sequence and 3' sequence

SEQ ID NO: 50636 - DNA, 53 bp, Artificial Sequence; identical to SEQ ID NO: 14922
  Description of Artificial Sequence: Synthetic casein; inner sequence and 3' sequence

SEQ ID NO: 50637 - DNA, 53 bp, Artificial Sequence; identical to SEQ ID NO: 7001
  Description of Artificial Sequence: Synthetic casein; inner sequence and 3' sequence

SEQ ID NO: 50638 - DNA, 53 bp, Artificial Sequence; identical to SEQ ID NO: 22692
  Description of Artificial Sequence: Synthetic casein; inner sequence and 3' sequence

SEQ ID NO: 50639 - DNA, 53 bp, Artificial Sequence; identical to SEQ ID NO: 22797
  Description of Artificial Sequence: Synthetic casein; inner sequence and 3' sequence

SEQ ID NO: 50640 - DNA, 53 bp, Artificial Sequence; identical to SEQ ID NO: 2697
  Description of Artificial Sequence: Synthetic casein; inner sequence and 3' sequence

SEQ ID NO: 50641 - DNA, 55 bp, Artificial Sequence
  Description of Artificial Sequence: Synthetic casein; inner sequence and 3' sequence
gcacgactcgcaccctatcatgaggccatgtgttgactagtacatgaccacttga

SEQ ID NO: 50642 - DNA, 53 bp, Artificial Sequence; identical to SEQ ID NO: 6469
  Description of Artificial Sequence: Synthetic casein; inner sequence and 3' sequence

SEQ ID NO: 50643 - DNA, 53 bp, Artificial Sequence; identical to SEQ ID NO: 46602
  Description of Artificial Sequence: Synthetic casein; inner sequence and 3' sequence

SEQ ID NO: 50644 - DNA, 53 bp, Artificial Sequence; identical to SEQ ID NO: 6694
  Description of Artificial Sequence: Synthetic casein; inner sequence and 3' sequence

SEQ ID NO: 50645 - DNA, 51 bp, Artificial Sequence
  Description of Artificial Sequence: Synthetic casein; inner sequence and 3' sequence
gtacgcaacgtaccgtatcgtggccatgttgactagtacatgaccacttga

SEQ ID NO: 50646 - DNA, 53 bp, Artificial Sequence; identical to SEQ ID NO: 46991
  Description of Artificial Sequence: Synthetic casein; inner sequence and 3' sequence

SEQ ID NO: 50647 - DNA, 53 bp, Artificial Sequence; identical to SEQ ID NO: 22307
  Description of Artificial Sequence: Synthetic casein; inner sequence and 3' sequence

SEQ ID NO: 50648 - DNA, 53 bp, Artificial Sequence; identical to SEQ ID NO: 46937
  Description of Artificial Sequence: Synthetic casein; inner sequence and 3' sequence

SEQ ID NO: 50649 - DNA, 53 bp, Artificial Sequence
  Description of Artificial Sequence: Synthetic casein; inner sequence and 3' sequence
cggtgtgacggcatcgtgacgtactgcgcattgactagtacatgaccacttga

SEQ ID NO: 50650 - DNA, 52 bp, Artificial Sequence; identical to SEQ ID NO: 2975
  Description of Artificial Sequence: Synthetic casein; inner sequence and 3' sequence

SEQ ID NO: 50651 - DNA, 53 bp, Artificial Sequence; identical to SEQ ID NO: 46924
  Description of Artificial Sequence: Synthetic casein; inner sequence and 3' sequence

SEQ ID NO: 50652 - DNA, 53 bp, Artificial Sequence; identical to SEQ ID NO: 22773
  Description of Artificial Sequence: Synthetic casein; inner sequence and 3' sequence

SEQ ID NO: 50653 - DNA, 53 bp, Artificial Sequence; identical to SEQ ID NO: 2100
  Description of Artificial Sequence: Synthetic casein; inner sequence and 3' sequence

SEQ ID NO: 50654 - DNA, 53 bp, Artificial Sequence; identical to SEQ ID NO: 22372
  Description of Artificial Sequence: Synthetic casein; inner sequence and 3' sequence

SEQ ID NO: 50655 - DNA, 53 bp, Artificial Sequence; identical to SEQ ID NO: 31000
  Description of Artificial Sequence: Synthetic casein; inner sequence and 3' sequence

SEQ ID NO: 50656 - DNA, 53 bp, Artificial Sequence
  Description of Artificial Sequence: Synthetic casein; inner sequence and 3' sequence
gcgatgggacgttacgtacggtacgccacattgactagtacatgaccacttga

SEQ ID NO: 50657 - DNA, 53 bp, Artificial Sequence; identical to SEQ ID NO: 18950
  Description of Artificial Sequence: Synthetic casein; inner sequence and 3' sequence

SEQ ID NO: 50658 - DNA, 53 bp, Artificial Sequence; identical to SEQ ID NO: 34190
  Description of Artificial Sequence: Synthetic casein; inner sequence and 3' sequence

SEQ ID NO: 50659 - DNA, 53 bp, Artificial Sequence; identical to SEQ ID NO: 30846
  Description of Artificial Sequence: Synthetic casein; inner sequence and 3' sequence

SEQ ID NO: 50660 - DNA, 51 bp, Artificial Sequence
  Description of Artificial Sequence: Synthetic casein; inner sequence and 3' sequence
ggacgcaacgtgtgcaatgttgtacgcattgactagtacatgaccacttga

SEQ ID NO: 50661 - DNA, 53 bp, Artificial Sequence; identical to SEQ ID NO: 2096
  Description of Artificial Sequence: Synthetic casein; inner sequence and 3' sequence

SEQ ID NO: 50662 - DNA, 53 bp, Artificial Sequence
  Description of Artificial Sequence: Synthetic casein; inner sequence and 3' sequence
gacgacaacgtaccgccatgttacgtcacgttgactagtacatgaccacttga

SEQ ID NO: 50663 - DNA, 53 bp, Artificial Sequence; identical to SEQ ID NO: 46544
  Description of Artificial Sequence: Synthetic casein; inner sequence and 3' sequence

SEQ ID NO: 50664 - DNA, 53 bp, Artificial Sequence; identical to SEQ ID NO: 46499
  Description of Artificial Sequence: Synthetic casein; inner sequence and 3' sequence

SEQ ID NO: 50665 - DNA, 53 bp, Artificial Sequence
  Description of Artificial Sequence: Synthetic casein; inner sequence and 3' sequence
ggacgcaacgcaacgatacgtgcttacgtgttgactagtacatgaccacttga

SEQ ID NO: 50666 - DNA, 53 bp, Artificial Sequence; identical to SEQ ID NO: 2332
  Description of Artificial Sequence: Synthetic casein; inner sequence and 3' sequence

SEQ ID NO: 50667 - DNA, 52 bp, Artificial Sequence; identical to SEQ ID NO: 6559
  Description of Artificial Sequence: Synthetic casein; inner sequence and 3' sequence

SEQ ID NO: 50668 - DNA, 53 bp, Artificial Sequence; identical to SEQ ID NO: 22668
  Description of Artificial Sequence: Synthetic casein; inner sequence and 3' sequence

SEQ ID NO: 50669 - DNA, 53 bp, Artificial Sequence; identical to SEQ ID NO: 46917
  Description of Artificial Sequence: Synthetic casein; inner sequence and 3' sequence

SEQ ID NO: 50670 - DNA, 53 bp, Artificial Sequence; identical to SEQ ID NO: 10868
  Description of Artificial Sequence: Synthetic casein; inner sequence and 3' sequence

SEQ ID NO: 50671 - DNA, 53 bp, Artificial Sequence; identical to SEQ ID NO: 46926
  Description of Artificial Sequence: Synthetic casein; inner sequence and 3' sequence

SEQ ID NO: 50672 - DNA, 53 bp, Artificial Sequence; identical to SEQ ID NO: 46379
  Description of Artificial Sequence: Synthetic casein; inner sequence and 3' sequence

SEQ ID NO: 50673 - DNA, 53 bp, Artificial Sequence; identical to SEQ ID NO: 34074
  Description of Artificial Sequence: Synthetic casein; inner sequence and 3' sequence

SEQ ID NO: 50674 - DNA, 53 bp, Artificial Sequence; identical to SEQ ID NO: 46556
  Description of Artificial Sequence: Synthetic casein; inner sequence and 3' sequence

SEQ ID NO: 50675 - DNA, 53 bp, Artificial Sequence; identical to SEQ ID NO: 2603
  Description of Artificial Sequence: Synthetic casein; inner sequence and 3' sequence

SEQ ID NO: 50676 - DNA, 53 bp, Artificial Sequence
  Description of Artificial Sequence: Synthetic casein; inner sequence and 3' sequence
gcgtaacggtacgtatccctgtcgtacgcattgactagtacatgaccacttga

SEQ ID NO: 50677 - DNA, 53 bp, Artificial Sequence
  Description of Artificial Sequence: Synthetic casein; inner sequence and 3' sequence
gcgtacacgtgcatcgtcttcgcgcacacgttgactagtacatgaccacttga

SEQ ID NO: 50678 - DNA, 53 bp, Artificial Sequence; identical to SEQ ID NO: 46849
  Description of Artificial Sequence: Synthetic casein; inner sequence and 3' sequence

SEQ ID NO: 50679 - DNA, 53 bp, Artificial Sequence; identical to SEQ ID NO: 46935
  Description of Artificial Sequence: Synthetic casein; inner sequence and 3' sequence

SEQ ID NO: 50680 - DNA, 53 bp, Artificial Sequence; identical to SEQ ID NO: 2048
  Description of Artificial Sequence: Synthetic casein; inner sequence and 3' sequence

SEQ ID NO: 50681 - DNA, 53 bp, Artificial Sequence
  Description of Artificial Sequence: Synthetic casein; inner sequence and 3' sequence
cgcgtcagcacgtgatggtacgtacgcacattgactagtacatgaccacttga

SEQ ID NO: 50682 - DNA, 53 bp, Artificial Sequence; identical to SEQ ID NO: 18799
  Description of Artificial Sequence: Synthetic casein; inner sequence and 3' sequence

SEQ ID NO: 50683 - DNA, 53 bp, Artificial Sequence
  Description of Artificial Sequence: Synthetic casein; inner sequence and 3' sequence
cgtgtccacgcaacatgtgtacgttacgcattgactagtacatgaccacttga

SEQ ID NO: 50684 - DNA, 53 bp, Artificial Sequence
  Description of Artificial Sequence: Synthetic casein; inner sequence and 3' sequence
ggacgcaacgtaccgtatcttggccatgtgttgactagtacatgaccacttga

SEQ ID NO: 50685 - DNA, 53 bp, Artificial Sequence; identical to SEQ ID NO: 30672
  Description of Artificial Sequence: Synthetic casein; inner sequence and 3' sequence

SEQ ID NO: 50686 - DNA, 53 bp, Artificial Sequence
  Description of Artificial Sequence: Synthetic casein; inner sequence and 3' sequence
gcactgtgtgtcgtaccgtcctgctgcacgttgactagtacatgaccacttga

SEQ ID NO: 50687 - DNA, 53 bp, Artificial Sequence
  Description of Artificial Sequence: Synthetic casein; inner sequence and 3' sequence
gacgtgacgcataccgtatgtacgttgtgcttgactagtacatgaccacttga

SEQ ID NO: 50688 - DNA, 53 bp, Artificial Sequence; identical to SEQ ID NO: 30818
  Description of Artificial Sequence: Synthetic casein; inner sequence and 3' sequence

SEQ ID NO: 50689 - DNA, 53 bp, Artificial Sequence; identical to SEQ ID NO: 2486
  Description of Artificial Sequence: Synthetic casein; inner sequence and 3' sequence

SEQ ID NO: 50690 - DNA, 53 bp, Artificial Sequence; identical to SEQ ID NO: 46947
  Description of Artificial Sequence: Synthetic casein; inner sequence and 3' sequence

SEQ ID NO: 50691 - DNA, 53 bp, Artificial Sequence
  Description of Artificial Sequence: Synthetic casein; inner sequence and 3' sequence
gacgtgccagcgtgacgtatggcatgcatcttgactagtacatgaccacttga

SEQ ID NO: 50692 - DNA, 53 bp, Artificial Sequence; identical to SEQ ID NO: 46677
  Description of Artificial Sequence: Synthetic casein; inner sequence and 3' sequence

SEQ ID NO: 50693 - DNA, 53 bp, Artificial Sequence
  Description of Artificial Sequence: Synthetic casein; inner sequence and 3' sequence
ggacgcaacgtaccgtatcgtggtcacgtattgactagtacatgaccacttga

SEQ ID NO: 50694 - DNA, 53 bp, Artificial Sequence; identical to SEQ ID NO: 46898
  Description of Artificial Sequence: Synthetic casein; inner sequence and 3' sequence

SEQ ID NO: 50695 - DNA, 53 bp, Artificial Sequence
  Description of Artificial Sequence: Synthetic casein; inner sequence and 3' sequence
acgtcatgacgtactgcgcatcacgacacgttgactagtacatgaccacttga

SEQ ID NO: 50696 - DNA, 53 bp, Artificial Sequence
  Description of Artificial Sequence: Synthetic casein; inner sequence and 3' sequence
gcacgactcgcaccctatcatgtcggcatgttgactagtacatgaccacttga

SEQ ID NO: 50697 - DNA, 53 bp, Artificial Sequence; identical to SEQ ID NO: 2788
  Description of Artificial Sequence: Synthetic casein; inner sequence and 3' sequence

SEQ ID NO: 50698 - DNA, 53 bp, Artificial Sequence
  Description of Artificial Sequence: Synthetic casein; inner sequence and 3' sequence
ggacgcaaagtaccgtatcgtggccatgtgttgactagtacatgaccacttga

SEQ ID NO: 50699 - DNA, 53 bp, Artificial Sequence; identical to SEQ ID NO: 2294
  Description of Artificial Sequence: Synthetic casein; inner sequence and 3' sequence

SEQ ID NO: 50700 - DNA, 53 bp, Artificial Sequence; identical to SEQ ID NO: 30677
  Description of Artificial Sequence: Synthetic casein; inner sequence and 3' sequence

SEQ ID NO: 50701 - DNA, 53 bp, Artificial Sequence; identical to SEQ ID NO: 46726
  Description of Artificial Sequence: Synthetic casein; inner sequence and 3' sequence

SEQ ID NO: 50702 - DNA, 53 bp, Artificial Sequence; identical to SEQ ID NO: 46610
  Description of Artificial Sequence: Synthetic casein; inner sequence and 3' sequence

SEQ ID NO: 50703 - DNA, 53 bp, Artificial Sequence; identical to SEQ ID NO: 2543
  Description of Artificial Sequence: Synthetic casein; inner sequence and 3' sequence

SEQ ID NO: 50704 - DNA, 52 bp, Artificial Sequence; identical to SEQ ID NO: 6763
  Description of Artificial Sequence: Synthetic casein; inner sequence and 3' sequence

SEQ ID NO: 50705 - DNA, 53 bp, Artificial Sequence; identical to SEQ ID NO: 22367
  Description of Artificial Sequence: Synthetic casein; inner sequence and 3' sequence

SEQ ID NO: 50706 - DNA, 53 bp, Artificial Sequence
  Description of Artificial Sequence: Synthetic casein; inner sequence and 3' sequence
ggacgcaacggaccgtatcgtggccatgtgttgactagtacatgaccacttga

SEQ ID NO: 50707 - DNA, 53 bp, Artificial Sequence; identical to SEQ ID NO: 46636
  Description of Artificial Sequence: Synthetic casein; inner sequence and 3' sequence

SEQ ID NO: 50708 - DNA, 53 bp, Artificial Sequence; identical to SEQ ID NO: 14767
  Description of Artificial Sequence: Synthetic casein; inner sequence and 3' sequence

SEQ ID NO: 50709 - DNA, 53 bp, Artificial Sequence
  Description of Artificial Sequence: Synthetic casein; inner sequence and 3' sequence
gcaacgccacgtacacgtccttgcctcacgttgactagtacatgaccacttga

SEQ ID NO: 50710 - DNA, 53 bp, Artificial Sequence; identical to SEQ ID NO: 46745
  Description of Artificial Sequence: Synthetic casein; inner sequence and 3' sequence

SEQ ID NO: 50711 - DNA, 53 bp, Artificial Sequence; identical to SEQ ID NO: 22923
  Description of Artificial Sequence: Synthetic casein; inner sequence and 3' sequence

SEQ ID NO: 50712 - DNA, 53 bp, Artificial Sequence; identical to SEQ ID NO: 2285
  Description of Artificial Sequence: Synthetic casein; inner sequence and 3' sequence

SEQ ID NO: 50713 - DNA, 53 bp, Artificial Sequence; identical to SEQ ID NO: 30884
  Description of Artificial Sequence: Synthetic casein; inner sequence and 3' sequence

SEQ ID NO: 50714 - DNA, 53 bp, Artificial Sequence; identical to SEQ ID NO: 18770
  Description of Artificial Sequence: Synthetic casein; inner sequence and 3' sequence

SEQ ID NO: 50715 - DNA, 53 bp, Artificial Sequence; identical to SEQ ID NO: 22669
  Description of Artificial Sequence: Synthetic casein; inner sequence and 3' sequence

SEQ ID NO: 50716 - DNA, 53 bp, Artificial Sequence
  Description of Artificial Sequence: Synthetic casein; inner sequence and 3' sequence
ggccacagcgtacctcaacgtggacatgcattgactagtacatgaccacttga

SEQ ID NO: 50717 - DNA, 53 bp, Artificial Sequence; identical to SEQ ID NO: 46805
  Description of Artificial Sequence: Synthetic casein; inner sequence and 3' sequence

SEQ ID NO: 50718 - DNA, 53 bp, Artificial Sequence
  Description of Artificial Sequence: Synthetic casein; inner sequence and 3' sequence
cgatacgtacgtagcatgcgatgtgacgcattgactagtacatgaccacttga

SEQ ID NO: 50719 - DNA, 53 bp, Artificial Sequence; identical to SEQ ID NO: 22410
  Description of Artificial Sequence: Synthetic casein; inner sequence and 3' sequence

SEQ ID NO: 50720 - DNA, 53 bp, Artificial Sequence
  Description of Artificial Sequence: Synthetic casein; inner sequence and 3' sequence
gcattacgcagccatacgcctcgatgcacgttgactagtacatgaccacttga

SEQ ID NO: 50721 - DNA, 53 bp, Artificial Sequence; identical to SEQ ID NO: 46739
  Description of Artificial Sequence: Synthetic casein; inner sequence and 3' sequence

SEQ ID NO: 50722 - DNA, 53 bp, Artificial Sequence; identical to SEQ ID NO: 46663
  Description of Artificial Sequence: Synthetic casein; inner sequence and 3' sequence

SEQ ID NO: 50723 - DNA, 53 bp, Artificial Sequence; identical to SEQ ID NO: 46642
  Description of Artificial Sequence: Synthetic casein; inner sequence and 3' sequence

SEQ ID NO: 50724 - DNA, 53 bp, Artificial Sequence
  Description of Artificial Sequence: Synthetic casein; inner sequence and 3' sequence
gcaacacagcgttacgtacgacacgacaccttgactagtacatgaccacttga

SEQ ID NO: 50725 - DNA, 53 bp, Artificial Sequence; identical to SEQ ID NO: 46936
  Description of Artificial Sequence: Synthetic casein; inner sequence and 3' sequence

SEQ ID NO: 50726 - DNA, 53 bp, Artificial Sequence
  Description of Artificial Sequence: Synthetic casein; inner sequence and 3' sequence
gatgcgtacgtcacgtcgtagtgctgcgcgttgactagtacatgaccacttga

SEQ ID NO: 50727 - DNA, 53 bp, Artificial Sequence
  Description of Artificial Sequence: Synthetic casein; inner sequence and 3' sequence
cgcgatgaggtgacgtgccttccgtacgcgttgactagtacatgaccacttga

SEQ ID NO: 50728 - DNA, 53 bp, Artificial Sequence; identical to SEQ ID NO: 22644
  Description of Artificial Sequence: Synthetic casein; inner sequence and 3' sequence

SEQ ID NO: 50729 - DNA, 53 bp, Artificial Sequence
  Description of Artificial Sequence: Synthetic casein; inner sequence and 3' sequence
acgtgtgccgcgcaacgtgatgtgtgcacattgactagtacatgaccacttga

SEQ ID NO: 50730 - DNA, 53 bp, Artificial Sequence; identical to SEQ ID NO: 22807
  Description of Artificial Sequence: Synthetic casein; inner sequence and 3' sequence

SEQ ID NO: 50731 - DNA, 53 bp, Artificial Sequence; identical to SEQ ID NO: 14945
  Description of Artificial Sequence: Synthetic casein; inner sequence and 3' sequence

SEQ ID NO: 50732 - DNA, 53 bp, Artificial Sequence; identical to SEQ ID NO: 46865
  Description of Artificial Sequence: Synthetic casein; inner sequence and 3' sequence

SEQ ID NO: 50733 - DNA, 53 bp, Artificial Sequence; identical to SEQ ID NO: 46879
  Description of Artificial Sequence: Synthetic casein; inner sequence and 3' sequence

SEQ ID NO: 50734 - DNA, 53 bp, Artificial Sequence; identical to SEQ ID NO: 2129
  Description of Artificial Sequence: Synthetic casein; inner sequence and 3' sequence

SEQ ID NO: 50735 - DNA, 53 bp, Artificial Sequence; identical to SEQ ID NO: 46723
  Description of Artificial Sequence: Synthetic casein; inner sequence and 3' sequence

SEQ ID NO: 50736 - DNA, 53 bp, Artificial Sequence; identical to SEQ ID NO: 2576
  Description of Artificial Sequence: Synthetic casein; inner sequence and 3' sequence

SEQ ID NO: 50737 - DNA, 53 bp, Artificial Sequence
  Description of Artificial Sequence: Synthetic casein; inner sequence and 3' sequence
gtcatgcacgaacactatcatggccgcatgttgactagtacatgaccacttga

SEQ ID NO: 50738 - DNA, 53 bp, Artificial Sequence; identical to SEQ ID NO: 22502
  Description of Artificial Sequence: Synthetic casein; inner sequence and 3' sequence

SEQ ID NO: 50739 - DNA, 53 bp, Artificial Sequence
  Description of Artificial Sequence: Synthetic casein; inner sequence and 3' sequence
cgatacgccatgatgtccgtgatctgcacgttgactagtacatgaccacttga

SEQ ID NO: 50740 - DNA, 53 bp, Artificial Sequence; identical to SEQ ID NO: 2789
  Description of Artificial Sequence: Synthetic casein; inner sequence and 3' sequence

SEQ ID NO: 50741 - DNA, 52 bp, Artificial Sequence
  Description of Artificial Sequence: Synthetic casein; inner sequence and 3' sequence
acgtgtgcggaacgtgtgtgccatacgcattgactagtacatgaccacttga

SEQ ID NO: 50742 - DNA, 51 bp, Artificial Sequence
  Description of Artificial Sequence: Synthetic casein; inner sequence and 3' sequence
ggacgcaacgtaccgcatcgtggccatgttgactagtacatgaccacttga

SEQ ID NO: 50743 - DNA, 53 bp, Artificial Sequence; identical to SEQ ID NO: 6918
  Description of Artificial Sequence: Synthetic casein; inner sequence and 3' sequence

SEQ ID NO: 50744 - DNA, 53 bp, Artificial Sequence; identical to SEQ ID NO: 22820
  Description of Artificial Sequence: Synthetic casein; inner sequence and 3' sequence

SEQ ID NO: 50745 - DNA, 53 bp, Artificial Sequence; identical to SEQ ID NO: 34619
  Description of Artificial Sequence: Synthetic casein; inner sequence and 3' sequence

SEQ ID NO: 50746 - DNA, 53 bp, Artificial Sequence
  Description of Artificial Sequence: Synthetic casein; inner sequence and 3' sequence
cgtatggcaggcacgtcacgtatgcgtggtttgactagtacatgaccacttga

SEQ ID NO: 50747 - DNA, 53 bp, Artificial Sequence; identical to SEQ ID NO: 30329
  Description of Artificial Sequence: Synthetic casein; inner sequence and 3' sequence

SEQ ID NO: 50748 - DNA, 53 bp, Artificial Sequence; identical to SEQ ID NO: 46845
  Description of Artificial Sequence: Synthetic casein; inner sequence and 3' sequence

SEQ ID NO: 50749 - DNA, 53 bp, Artificial Sequence; identical to SEQ ID NO: 2991
  Description of Artificial Sequence: Synthetic casein; inner sequence and 3' sequence

SEQ ID NO: 50750 - DNA, 53 bp, Artificial Sequence; identical to SEQ ID NO: 2853
  Description of Artificial Sequence: Synthetic casein; inner sequence and 3' sequence

SEQ ID NO: 50751 - DNA, 53 bp, Artificial Sequence; identical to SEQ ID NO: 22853
  Description of Artificial Sequence: Synthetic casein; inner sequence and 3' sequence

SEQ ID NO: 50752 - DNA, 53 bp, Artificial Sequence
  Description of Artificial Sequence: Synthetic casein; inner sequence and 3' sequence
acgtcacgtcacgtaggtatggctgacgcgttgactagtacatgaccacttga

SEQ ID NO: 50753 - DNA, 53 bp, Artificial Sequence; identical to SEQ ID NO: 2088
  Description of Artificial Sequence: Synthetic casein; inner sequence and 3' sequence

SEQ ID NO: 50754 - DNA, 53 bp, Artificial Sequence; identical to SEQ ID NO: 18698
  Description of Artificial Sequence: Synthetic casein; inner sequence and 3' sequence

SEQ ID NO: 50755 - DNA, 53 bp, Artificial Sequence; identical to SEQ ID NO: 2754
  Description of Artificial Sequence: Synthetic casein; inner sequence and 3' sequence

SEQ ID NO: 50756 - DNA, 53 bp, Artificial Sequence; identical to SEQ ID NO: 46771
  Description of Artificial Sequence: Synthetic casein; inner sequence and 3' sequence

SEQ ID NO: 50757 - DNA, 53 bp, Artificial Sequence
  Description of Artificial Sequence: Synthetic casein; inner sequence and 3' sequence
cgtacgcacacggaccgcatgtaccgcatgttgactagtacatgaccacttga

SEQ ID NO: 50758 - DNA, 53 bp, Artificial Sequence; identical to SEQ ID NO: 2159
  Description of Artificial Sequence: Synthetic casein; inner sequence and 3' sequence

SEQ ID NO: 50759 - DNA, 53 bp, Artificial Sequence; identical to SEQ ID NO: 34484
  Description of Artificial Sequence: Synthetic casein; inner sequence and 3' sequence

SEQ ID NO: 50760 - DNA, 53 bp, Artificial Sequence; identical to SEQ ID NO: 46733
  Description of Artificial Sequence: Synthetic casein; inner sequence and 3' sequence

SEQ ID NO: 50761 - DNA, 53 bp, Artificial Sequence; identical to SEQ ID NO: 22976
  Description of Artificial Sequence: Synthetic casein; inner sequence and 3' sequence

SEQ ID NO: 50762 - DNA, 53 bp, Artificial Sequence; identical to SEQ ID NO: 10985
  Description of Artificial Sequence: Synthetic casein; inner sequence and 3' sequence

SEQ ID NO: 50763 - DNA, 53 bp, Artificial Sequence; identical to SEQ ID NO: 46907
  Description of Artificial Sequence: Synthetic casein; inner sequence and 3' sequence

SEQ ID NO: 50764 - DNA, 53 bp, Artificial Sequence
  Description of Artificial Sequence: Synthetic casein; inner sequence and 3' sequence
cgacagcatggcgaggtacgcaacgtcacgttgactagtacatgaccacttga

SEQ ID NO: 50765 - DNA, 53 bp, Artificial Sequence; identical to SEQ ID NO: 2497
  Description of Artificial Sequence: Synthetic casein; inner sequence and 3' sequence

SEQ ID NO: 50766 - DNA, 53 bp, Artificial Sequence; identical to SEQ ID NO: 2840
  Description of Artificial Sequence: Synthetic casein; inner sequence and 3' sequence

SEQ ID NO: 50767 - DNA, 53 bp, Artificial Sequence
  Description of Artificial Sequence: Synthetic casein; inner sequence and 3' sequence
gcgatgcgacaacgatgtccgtgctgtacgttgactagtacatgaccacttga

SEQ ID NO: 50768 - DNA, 53 bp, Artificial Sequence; identical to SEQ ID NO: 34084
  Description of Artificial Sequence: Synthetic casein; inner sequence and 3' sequence

SEQ ID NO: 50769 - DNA, 53 bp, Artificial Sequence; identical to SEQ ID NO: 2512
  Description of Artificial Sequence: Synthetic casein; inner sequence and 3' sequence

SEQ ID NO: 50770 - DNA, 53 bp, Artificial Sequence; identical to SEQ ID NO: 6517
  Description of Artificial Sequence: Synthetic casein; inner sequence and 3' sequence

SEQ ID NO: 50771 - DNA, 53 bp, Artificial Sequence
  Description of Artificial Sequence: Synthetic casein; inner sequence and 3' sequence
tgcgttacgtacgcatgcctcgacgtcacgttgactagtacatgaccacttga

SEQ ID NO: 50772 - DNA, 53 bp, Artificial Sequence; identical to SEQ ID NO: 46782
  Description of Artificial Sequence: Synthetic casein; inner sequence and 3' sequence

SEQ ID NO: 50773 - DNA, 53 bp, Artificial Sequence
  Description of Artificial Sequence: Synthetic casein; inner sequence and 3' sequence
gcgatacgcgatcacaccttccgttgcacgttgactagtacatgaccacttga

SEQ ID NO: 50774 - DNA, 53 bp, Artificial Sequence
  Description of Artificial Sequence: Synthetic casein; inner sequence and 3' sequence
acgtgcacagcatgcgttcgatccgtcacgttgactagtacatgaccacttga

SEQ ID NO: 50775 - DNA, 53 bp, Artificial Sequence; identical to SEQ ID NO: 34136
  Description of Artificial Sequence: Synthetic casein; inner sequence and 3' sequence

SEQ ID NO: 50776 - DNA, 53 bp, Artificial Sequence
  Description of Artificial Sequence: Synthetic casein; inner sequence and 3' sequence
gcatgaggacgtgacggaacggtgtgcgtgttgactagtacatgaccacttga

SEQ ID NO: 50777 - DNA, 53 bp, Artificial Sequence
  Description of Artificial Sequence: Synthetic casein; inner sequence and 3' sequence
gtcatgcacgatcactatcatggcggcatgttgactagtacatgaccacttga

SEQ ID NO: 50778 - DNA, 53 bp, Artificial Sequence; identical to SEQ ID NO: 2920
  Description of Artificial Sequence: Synthetic casein; inner sequence and 3' sequence

SEQ ID NO: 50779 - DNA, 53 bp, Artificial Sequence; identical to SEQ ID NO: 2685
  Description of Artificial Sequence: Synthetic casein; inner sequence and 3' sequence

SEQ ID NO: 50780 - DNA, 53 bp, Artificial Sequence
  Description of Artificial Sequence: Synthetic casein; inner sequence and 3' sequence
ggcatgcgatgtacgaggcatgatgcgtcattgactagtacatgaccacttga

SEQ ID NO: 50781 - DNA, 53 bp, Artificial Sequence
  Description of Artificial Sequence: Synthetic casein; inner sequence and 3' sequence
cacgtaccagcgcatgtccgacacgtcacgttgactagtacatgaccacttga

SEQ ID NO: 50782 - DNA, 53 bp, Artificial Sequence
  Description of Artificial Sequence: Synthetic casein; inner sequence and 3' sequence
cgtgtggcacgacaacacgttccgtccacgttgactagtacatgaccacttga

SEQ ID NO: 50783 - DNA, 53 bp, Artificial Sequence
  Description of Artificial Sequence: Synthetic casein; inner sequence and 3' sequence
gccctgcacgcaccctatcatgtaggcatgttgactagtacatgaccacttga

SEQ ID NO: 50784 - DNA, 53 bp, Artificial Sequence
  Description of Artificial Sequence: Synthetic casein; inner sequence and 3' sequence
gcacgtacggacgatgcgtgtgccttcgcattgactagtacatgaccacttga

SEQ ID NO: 50785 - DNA, 53 bp, Artificial Sequence; identical to SEQ ID NO: 46820
  Description of Artificial Sequence: Synthetic casein; inner sequence and 3' sequence

SEQ ID NO: 50786 - DNA, 53 bp, Artificial Sequence
  Description of Artificial Sequence: Synthetic casein; inner sequence and 3' sequence
gcacgactcgcaccctatcatgtagccatgttgactagtacatgaccacttga

SEQ ID NO: 50787 - DNA, 53 bp, Artificial Sequence
  Description of Artificial Sequence: Synthetic casein; inner sequence and 3' sequence
agcgtgcatgctcacgtgacgtactgcgtgttgactagtacatgaccacttga

SEQ ID NO: 50788 - DNA, 53 bp, Artificial Sequence; identical to SEQ ID NO: 46637
  Description of Artificial Sequence: Synthetic casein; inner sequence and 3' sequence

SEQ ID NO: 50789 - DNA, 53 bp, Artificial Sequence; identical to SEQ ID NO: 2580
  Description of Artificial Sequence: Synthetic casein; inner sequence and 3' sequence

SEQ ID NO: 50790 - DNA, 53 bp, Artificial Sequence; identical to SEQ ID NO: 6617
  Description of Artificial Sequence: Synthetic casein; inner sequence and 3' sequence

SEQ ID NO: 50791 - DNA, 53 bp, Artificial Sequence
  Description of Artificial Sequence: Synthetic casein; inner sequence and 3' sequence
acgtcacgttgcatcgtagctgtgtccgccttgactagtacatgaccacttga

SEQ ID NO: 50792 - DNA, 53 bp, Artificial Sequence; identical to SEQ ID NO: 46609
  Description of Artificial Sequence: Synthetic casein; inner sequence and 3' sequence

SEQ ID NO: 50793 - DNA, 53 bp, Artificial Sequence; identical to SEQ ID NO: 22899
  Description of Artificial Sequence: Synthetic casein; inner sequence and 3' sequence

SEQ ID NO: 50794 - DNA, 53 bp, Artificial Sequence; identical to SEQ ID NO: 46599
  Description of Artificial Sequence: Synthetic casein; inner sequence and 3' sequence

SEQ ID NO: 50795 - DNA, 53 bp, Artificial Sequence; identical to SEQ ID NO: 2498
  Description of Artificial Sequence: Synthetic casein; inner sequence and 3' sequence

SEQ ID NO: 50796 - DNA, 53 bp, Artificial Sequence
  Description of Artificial Sequence: Synthetic casein; inner sequence and 3' sequence
cgtgacgtgcgtgcagttacgtgtgccacgttgactagtacatgaccacttga

SEQ ID NO: 50797 - DNA, 53 bp, Artificial Sequence; identical to SEQ ID NO: 18726
  Description of Artificial Sequence: Synthetic casein; inner sequence and 3' sequence

SEQ ID NO: 50798 - DNA, 53 bp, Artificial Sequence
  Description of Artificial Sequence: Synthetic casein; inner sequence and 3' sequence
ggtacgcatcgaccacgcaacacgtgcgcattgactagtacatgaccacttga

SEQ ID NO: 50799 - DNA, 53 bp, Artificial Sequence; identical to SEQ ID NO: 18412
  Description of Artificial Sequence: Synthetic casein; inner sequence and 3' sequence

SEQ ID NO: 50800 - DNA, 53 bp, Artificial Sequence; identical to SEQ ID NO: 30836
  Description of Artificial Sequence: Synthetic casein; inner sequence and 3' sequence

SEQ ID NO: 50801 - DNA, 53 bp, Artificial Sequence; identical to SEQ ID NO: 46834
  Description of Artificial Sequence: Synthetic casein; inner sequence and 3' sequence

SEQ ID NO: 50802 - DNA, 53 bp, Artificial Sequence
  Description of Artificial Sequence: Synthetic casein; inner sequence and 3' sequence
cgtaccgcacgcagtcgataggcatgcacattgactagtacatgaccacttga

SEQ ID NO: 50803 - DNA, 53 bp, Artificial Sequence; identical to SEQ ID NO: 22533
  Description of Artificial Sequence: Synthetic casein; inner sequence and 3' sequence

SEQ ID NO: 50804 - DNA, 53 bp, Artificial Sequence
  Description of Artificial Sequence: Synthetic casein; inner sequence and 3' sequence
acgtgtacgtagcatgtcgcgatctgcacgttgactagtacatgaccacttga

SEQ ID NO: 50805 - DNA, 53 bp, Artificial Sequence; identical to SEQ ID NO: 2923
  Description of Artificial Sequence: Synthetic casein; inner sequence and 3' sequence

SEQ ID NO: 50806 - DNA, 53 bp, Artificial Sequence; identical to SEQ ID NO: 2717
  Description of Artificial Sequence: Synthetic casein; inner sequence and 3' sequence

SEQ ID NO: 50807 - DNA, 53 bp, Artificial Sequence; identical to SEQ ID NO: 34622
  Description of Artificial Sequence: Synthetic casein; inner sequence and 3' sequence

SEQ ID NO: 50808 - DNA, 53 bp, Artificial Sequence; identical to SEQ ID NO: 47001
  Description of Artificial Sequence: Synthetic casein; inner sequence and 3' sequence

SEQ ID NO: 50809 - DNA, 53 bp, Artificial Sequence; identical to SEQ ID NO: 46487
  Description of Artificial Sequence: Synthetic casein; inner sequence and 3' sequence

SEQ ID NO: 50810 - DNA, 53 bp, Artificial Sequence
  Description of Artificial Sequence: Synthetic casein; inner sequence and 3' sequence
gacgtgacgcgatcggtacgtgacgttgcgttgactagtacatgaccacttga

SEQ ID NO: 50811 - DNA, 53 bp, Artificial Sequence
  Description of Artificial Sequence: Synthetic casein; inner sequence and 3' sequence
ggacgcaccgtaccgtatcgtggccatgtattgactagtacatgaccacttga

SEQ ID NO: 50812 - DNA, 53 bp, Artificial Sequence
  Description of Artificial Sequence: Synthetic casein; inner sequence and 3' sequence
gcacgtgcacatgcctcgtttcgcgtcacgttgactagtacatgaccacttga

SEQ ID NO: 50813 - DNA, 53 bp, Artificial Sequence
  Description of Artificial Sequence: Synthetic casein; inner sequence and 3' sequence
gacgtgatgcgtgtcgtatgtgccttgtgcttgactagtacatgaccacttga

SEQ ID NO: 50814 - DNA, 53 bp, Artificial Sequence; identical to SEQ ID NO: 22736
  Description of Artificial Sequence: Synthetic casein; inner sequence and 3' sequence

SEQ ID NO: 50815 - DNA, 53 bp, Artificial Sequence; identical to SEQ ID NO: 46580
  Description of Artificial Sequence: Synthetic casein; inner sequence and 3' sequence

SEQ ID NO: 50816 - DNA, 53 bp, Artificial Sequence; identical to SEQ ID NO: 46635
  Description of Artificial Sequence: Synthetic casein; inner sequence and 3' sequence

SEQ ID NO: 50817 - DNA, 53 bp, Artificial Sequence
  Description of Artificial Sequence: Synthetic casein; inner sequence and 3' sequence
ccatgcatcacgtcgtcacgcagcctcacgttgactagtacatgaccacttga

SEQ ID NO: 50818 - DNA, 53 bp, Artificial Sequence; identical to SEQ ID NO: 2055
  Description of Artificial Sequence: Synthetic casein; inner sequence and 3' sequence

SEQ ID NO: 50819 - DNA, 53 bp, Artificial Sequence; identical to SEQ ID NO: 2029
  Description of Artificial Sequence: Synthetic casein; inner sequence and 3' sequence

SEQ ID NO: 50820 - DNA, 53 bp, Artificial Sequence
  Description of Artificial Sequence: Synthetic casein; inner sequence and 3' sequence
ccatcgcgtcacatggtacggtgcgacacgttgactagtacatgaccacttga

SEQ ID NO: 50821 - DNA, 53 bp, Artificial Sequence; identical to SEQ ID NO: 34341
  Description of Artificial Sequence: Synthetic casein; inner sequence and 3' sequence

SEQ ID NO: 50822 - DNA, 53 bp, Artificial Sequence
  Description of Artificial Sequence: Synthetic casein; inner sequence and 3' sequence
cacgccacatcgtgacatagggcatgcgcgttgactagtacatgaccacttga

SEQ ID NO: 50823 - DNA, 53 bp, Artificial Sequence; identical to SEQ ID NO: 2553
  Description of Artificial Sequence: Synthetic casein; inner sequence and 3' sequence

SEQ ID NO: 50824 - DNA, 53 bp, Artificial Sequence
  Description of Artificial Sequence: Synthetic casein; inner sequence and 3' sequence
cacgtcacgcatcagatgtcgcacttcacgttgactagtacatgaccacttga

SEQ ID NO: 50825 - DNA, 53 bp, Artificial Sequence; identical to SEQ ID NO: 46732
  Description of Artificial Sequence: Synthetic casein; inner sequence and 3' sequence

SEQ ID NO: 50826 - DNA, 53 bp, Artificial Sequence; identical to SEQ ID NO: 18866
  Description of Artificial Sequence: Synthetic casein; inner sequence and 3' sequence

SEQ ID NO: 50827 - DNA, 53 bp, Artificial Sequence
  Description of Artificial Sequence: Synthetic casein; inner sequence and 3' sequence
gcgatgaagcatgcgtacgtcctgcgcacgttgactagtacatgaccacttga

SEQ ID NO: 50828 - DNA, 53 bp, Artificial Sequence
  Description of Artificial Sequence: Synthetic casein; inner sequence and 3' sequence
gtcacgcaggacgatgcgatgtgcttcgcgttgactagtacatgaccacttga

SEQ ID NO: 50829 - DNA, 53 bp, Artificial Sequence; identical to SEQ ID NO: 22946
  Description of Artificial Sequence: Synthetic casein; inner sequence and 3' sequence

SEQ ID NO: 50830 - DNA, 53 bp, Artificial Sequence; identical to SEQ ID NO: 2488
  Description of Artificial Sequence: Synthetic casein; inner sequence and 3' sequence

SEQ ID NO: 50831 - DNA, 53 bp, Artificial Sequence
  Description of Artificial Sequence: Synthetic casein; inner sequence and 3' sequence
gacacgtcacgatgcacgtactacgacacgttgactagtacatgaccacttga

SEQ ID NO: 50832 - DNA, 53 bp, Artificial Sequence; identical to SEQ ID NO: 2429
  Description of Artificial Sequence: Synthetic casein; inner sequence and 3' sequence

SEQ ID NO: 50833 - DNA, 53 bp, Artificial Sequence; identical to SEQ ID NO: 46953
  Description of Artificial Sequence: Synthetic casein; inner sequence and 3' sequence

SEQ ID NO: 50834 - DNA, 53 bp, Artificial Sequence; identical to SEQ ID NO: 18561
  Description of Artificial Sequence: Synthetic casein; inner sequence and 3' sequence

SEQ ID NO: 50835 - DNA, 53 bp, Artificial Sequence
  Description of Artificial Sequence: Synthetic casein; inner sequence and 3' sequence
gccgtgacgatgacgtgttggacatgcaccttgactagtacatgaccacttga

SEQ ID NO: 50836 - DNA, 53 bp, Artificial Sequence
  Description of Artificial Sequence: Synthetic casein; inner sequence and 3' sequence
gcgtgacatggcaggcacacgttacgcacattgactagtacatgaccacttga

SEQ ID NO: 50837 - DNA, 53 bp, Artificial Sequence
  Description of Artificial Sequence: Synthetic casein; inner sequence and 3' sequence
gcatcgtgcagcacgtccactcgatgcacgttgactagtacatgaccacttga

SEQ ID NO: 50838 - DNA, 53 bp, Artificial Sequence; identical to SEQ ID NO: 46889
  Description of Artificial Sequence: Synthetic casein; inner sequence and 3' sequence

SEQ ID NO: 50839 - DNA, 53 bp, Artificial Sequence; identical to SEQ ID NO: 30595
  Description of Artificial Sequence: Synthetic casein; inner sequence and 3' sequence

SEQ ID NO: 50840 - DNA, 53 bp, Artificial Sequence
  Description of Artificial Sequence: Synthetic casein; inner sequence and 3' sequence
gcatacgacatcgatacgtaccgctgcacgttgactagtacatgaccacttga

SEQ ID NO: 50841 - DNA, 53 bp, Artificial Sequence; identical to SEQ ID NO: 46643
  Description of Artificial Sequence: Synthetic casein; inner sequence and 3' sequence

SEQ ID NO: 50842 - DNA, 55 bp, Artificial Sequence
  Description of Artificial Sequence: Synthetic casein; inner sequence and 3' sequence
gtcactgtgcctgaccgtcaagttgcggcatgttgactagtacatgaccacttga

SEQ ID NO: 50843 - DNA, 53 bp, Artificial Sequence; identical to SEQ ID NO: 22594
  Description of Artificial Sequence: Synthetic casein; inner sequence and 3' sequence

SEQ ID NO: 50844 - DNA, 53 bp, Artificial Sequence
  Description of Artificial Sequence: Synthetic casein; inner sequence and 3' sequence
gcgtgacgatacgtaccgatgtgatgcgcattgactagtacatgaccacttga

SEQ ID NO: 50845 - DNA, 53 bp, Artificial Sequence
  Description of Artificial Sequence: Synthetic casein; inner sequence and 3' sequence
gcaacacgatgcaccgtacggatcggcacgttgactagtacatgaccacttga

SEQ ID NO: 50846 - DNA, 53 bp, Artificial Sequence
  Description of Artificial Sequence: Synthetic casein; inner sequence and 3' sequence
ggacgcaacgtaccgtatcgtggccctgtattgactagtacatgaccacttga

SEQ ID NO: 50847 - DNA, 53 bp, Artificial Sequence
  Description of Artificial Sequence: Synthetic casein; inner sequence and 3' sequence
gcatacggcacaggcagcacgtacgccacgttgactagtacatgaccacttga

SEQ ID NO: 50848 - DNA, 53 bp, Artificial Sequence; identical to SEQ ID NO: 2292
  Description of Artificial Sequence: Synthetic casein; inner sequence and 3' sequence

SEQ ID NO: 50849 - DNA, 53 bp, Artificial Sequence; identical to SEQ ID NO: 22343
  Description of Artificial Sequence: Synthetic casein; inner sequence and 3' sequence

SEQ ID NO: 50850 - DNA, 53 bp, Artificial Sequence; identical to SEQ ID NO: 22690
  Description of Artificial Sequence: Synthetic casein; inner sequence and 3' sequence

SEQ ID NO: 50851 - DNA, 53 bp, Artificial Sequence; identical to SEQ ID NO: 18692
  Description of Artificial Sequence: Synthetic casein; inner sequence and 3' sequence

SEQ ID NO: 50852 - DNA, 53 bp, Artificial Sequence
  Description of Artificial Sequence: Synthetic casein; inner sequence and 3' sequence
cgtgccgaacggatcgtatgacgtgacgcattgactagtacatgaccacttga

SEQ ID NO: 50853 - DNA, 53 bp, Artificial Sequence; identical to SEQ ID NO: 22700
  Description of Artificial Sequence: Synthetic casein; inner sequence and 3' sequence

SEQ ID NO: 50854 - DNA, 53 bp, Artificial Sequence; identical to SEQ ID NO: 22353
  Description of Artificial Sequence: Synthetic casein; inner sequence and 3' sequence

SEQ ID NO: 50855 - DNA, 53 bp, Artificial Sequence; identical to SEQ ID NO: 2196
  Description of Artificial Sequence: Synthetic casein; inner sequence and 3' sequence

SEQ ID NO: 50856 - DNA, 53 bp, Artificial Sequence
  Description of Artificial Sequence: Synthetic casein; inner sequence and 3' sequence
gcacgcaacgtaccgtatcgtggccatgtattgactagtacatgaccacttga

SEQ ID NO: 50857 - DNA, 53 bp, Artificial Sequence; identical to SEQ ID NO: 38827
  Description of Artificial Sequence: Synthetic casein; inner sequence and 3' sequence

SEQ ID NO: 50858 - DNA, 53 bp, Artificial Sequence
  Description of Artificial Sequence: Synthetic casein; inner sequence and 3' sequence
ggacgcaacgtcccgtatcgtggccatgtgttgactagtacatgaccacttga

SEQ ID NO: 50859 - DNA, 53 bp, Artificial Sequence; identical to SEQ ID NO: 46901
  Description of Artificial Sequence: Synthetic casein; inner sequence and 3' sequence

SEQ ID NO: 50860 - DNA, 53 bp, Artificial Sequence; identical to SEQ ID NO: 10949
  Description of Artificial Sequence: Synthetic casein; inner sequence and 3' sequence

SEQ ID NO: 50861 - DNA, 53 bp, Artificial Sequence
  Description of Artificial Sequence: Synthetic casein; inner sequence and 3' sequence
cacgtccacacgcgatgcatcacgtacgcattgactagtacatgaccacttga

SEQ ID NO: 50862 - DNA, 53 bp, Artificial Sequence
  Description of Artificial Sequence: Synthetic casein; inner sequence and 3' sequence
cgtaacgcacgatgcacggtatgtggcacattgactagtacatgaccacttga

SEQ ID NO: 50863 - DNA, 53 bp, Artificial Sequence; identical to SEQ ID NO: 18715
  Description of Artificial Sequence: Synthetic casein; inner sequence and 3' sequence

SEQ ID NO: 50864 - DNA, 53 bp, Artificial Sequence
  Description of Artificial Sequence: Synthetic casein; inner sequence and 3' sequence
cgtgacacggtgcgtgacgttacctgcgcgttgactagtacatgaccacttga

SEQ ID NO: 50865 - DNA, 53 bp, Artificial Sequence; identical to SEQ ID NO: 2505
  Description of Artificial Sequence: Synthetic casein; inner sequence and 3' sequence

SEQ ID NO: 50866 - DNA, 53 bp, Artificial Sequence
  Description of Artificial Sequence: Synthetic casein; inner sequence and 3' sequence
ggacgcatcgtaccgtatcgtggccatgtgttgactagtacatgaccacttga

SEQ ID NO: 50867 - DNA, 48 bp, Artificial Sequence; identical to SEQ ID NO: 22741
  Description of Artificial Sequence: Synthetic casein; inner sequence and 3' sequence

SEQ ID NO: 50868 - DNA, 53 bp, Artificial Sequence; identical to SEQ ID NO: 22974
  Description of Artificial Sequence: Synthetic casein; inner sequence and 3' sequence

SEQ ID NO: 50869 - DNA, 53 bp, Artificial Sequence; identical to SEQ ID NO: 30864
  Description of Artificial Sequence: Synthetic casein; inner sequence and 3' sequence

SEQ ID NO: 50870 - DNA, 53 bp, Artificial Sequence; identical to SEQ ID NO: 2167
  Description of Artificial Sequence: Synthetic casein; inner sequence and 3' sequence

SEQ ID NO: 50871 - DNA, 53 bp, Artificial Sequence; identical to SEQ ID NO: 30620
  Description of Artificial Sequence: Synthetic casein; inner sequence and 3' sequence

SEQ ID NO: 50872 - DNA, 53 bp, Artificial Sequence
  Description of Artificial Sequence: Synthetic casein; inner sequence and 3' sequence
gcgtcaggatggacgtactctcacgtcacgttgactagtacatgaccacttga

SEQ ID NO: 50873 - DNA, 53 bp, Artificial Sequence; identical to SEQ ID NO: 30848
  Description of Artificial Sequence: Synthetic casein; inner sequence and 3' sequence

SEQ ID NO: 50874 - DNA, 53 bp, Artificial Sequence; identical to SEQ ID NO: 18750
  Description of Artificial Sequence: Synthetic casein; inner sequence and 3' sequence

SEQ ID NO: 50875 - DNA, 52 bp, Artificial Sequence; identical to SEQ ID NO: 2549
  Description of Artificial Sequence: Synthetic casein; inner sequence and 3' sequence

SEQ ID NO: 50876 - DNA, 53 bp, Artificial Sequence
  Description of Artificial Sequence: Synthetic casein; inner sequence and 3' sequence
cgatgcgcatcgtatcggcacagtgacgcgttgactagtacatgaccacttga

SEQ ID NO: 50877 - DNA, 53 bp, Artificial Sequence
  Description of Artificial Sequence: Synthetic casein; inner sequence and 3' sequence
ggccacagcgtacctcaacgtggacgtgcgttgactagtacatgaccacttga

SEQ ID NO: 50878 - DNA, 53 bp, Artificial Sequence
  Description of Artificial Sequence: Synthetic casein; inner sequence and 3' sequence
ggcatgcgatgaacgaggcatgttgcgtcattgactagtacatgaccacttga

SEQ ID NO: 50879 - DNA, 53 bp, Artificial Sequence; identical to SEQ ID NO: 2044
  Description of Artificial Sequence: Synthetic casein; inner sequence and 3' sequence

SEQ ID NO: 50880 - DNA, 53 bp, Artificial Sequence
  Description of Artificial Sequence: Synthetic casein; inner sequence and 3' sequence
gcgtcacacgtagcgttacgggacggcacgttgactagtacatgaccacttga

SEQ ID NO: 50881 - DNA, 52 bp, Artificial Sequence; identical to SEQ ID NO: 6869
  Description of Artificial Sequence: Synthetic casein; inner sequence and 3' sequence

SEQ ID NO: 50882 - DNA, 53 bp, Artificial Sequence; identical to SEQ ID NO: 2185
  Description of Artificial Sequence: Synthetic casein; inner sequence and 3' sequence

SEQ ID NO: 50883 - DNA, 52 bp, Artificial Sequence
  Description of Artificial Sequence: Synthetic casein; inner sequence and 3' sequence
gcgtgccatcgtacgtatcgcactgtgcattgactagtacatgaccacttga

SEQ ID NO: 50884 - DNA, 53 bp, Artificial Sequence; identical to SEQ ID NO: 22913
  Description of Artificial Sequence: Synthetic casein; inner sequence and 3' sequence

SEQ ID NO: 50885 - DNA, 53 bp, Artificial Sequence
  Description of Artificial Sequence: Synthetic casein; inner sequence and 3' sequence
cgtgttgcacgtactcatgctgccttcgcgttgactagtacatgaccacttga

SEQ ID NO: 50886 - DNA, 53 bp, Artificial Sequence
  Description of Artificial Sequence: Synthetic casein; inner sequence and 3' sequence
cgacatgtcgcactgaccgtcacgtacacgttgactagtacatgaccacttga

SEQ ID NO: 50887 - DNA, 53 bp, Artificial Sequence; identical to SEQ ID NO: 2186
  Description of Artificial Sequence: Synthetic casein; inner sequence and 3' sequence

SEQ ID NO: 50888 - DNA, 53 bp, Artificial Sequence
  Description of Artificial Sequence: Synthetic casein; inner sequence and 3' sequence
cgtacgtacgcaggcacgttcccgttcgtgttgactagtacatgaccacttga

SEQ ID NO: 50889 - DNA, 53 bp, Artificial Sequence; identical to SEQ ID NO: 22528
  Description of Artificial Sequence: Synthetic casein; inner sequence and 3' sequence

SEQ ID NO: 50890 - DNA, 53 bp, Artificial Sequence
  Description of Artificial Sequence: Synthetic casein; inner sequence and 3' sequence
gcgacgtggcgtaacgtatcgtgcttcgtcttgactagtacatgaccacttga

SEQ ID NO: 50891 - DNA, 53 bp, Artificial Sequence; identical to SEQ ID NO: 34304
  Description of Artificial Sequence: Synthetic casein; inner sequence and 3' sequence

SEQ ID NO: 50892 - DNA, 53 bp, Artificial Sequence
  Description of Artificial Sequence: Synthetic casein; inner sequence and 3' sequence
acgtgcaggacgacgtgcgtgacgtacgccttgactagtacatgaccacttga

SEQ ID NO: 50893 - DNA, 53 bp, Artificial Sequence; identical to SEQ ID NO: 46301
  Description of Artificial Sequence: Synthetic casein; inner sequence and 3' sequence

SEQ ID NO: 50894 - DNA, 53 bp, Artificial Sequence
  Description of Artificial Sequence: Synthetic casein; inner sequence and 3' sequence
acgtgcatgtgacgtgtcgtgcagttcgcattgactagtacatgaccacttga

SEQ ID NO: 50895 - DNA, 53 bp, Artificial Sequence
  Description of Artificial Sequence: Synthetic casein; inner sequence and 3' sequence
ccgtcacacacaaggcacgtacgttgcacgttgactagtacatgaccacttga

SEQ ID NO: 50896 - DNA, 53 bp, Artificial Sequence; identical to SEQ ID NO: 2181
  Description of Artificial Sequence: Synthetic casein; inner sequence and 3' sequence

SEQ ID NO: 50897 - DNA, 53 bp, Artificial Sequence; identical to SEQ ID NO: 22733
  Description of Artificial Sequence: Synthetic casein; inner sequence and 3' sequence

SEQ ID NO: 50898 - DNA, 53 bp, Artificial Sequence; identical to SEQ ID NO: 46688
  Description of Artificial Sequence: Synthetic casein; inner sequence and 3' sequence

SEQ ID NO: 50899 - DNA, 53 bp, Artificial Sequence
  Description of Artificial Sequence: Synthetic casein; inner sequence and 3' sequence
ggacacagcgtacctcaacgtggacgcgcattgactagtacatgaccacttga

SEQ ID NO: 50900 - DNA, 53 bp, Artificial Sequence
  Description of Artificial Sequence: Synthetic casein; inner sequence and 3' sequence
gcgatacggcatgaccgttgctacgtcacgttgactagtacatgaccacttga

SEQ ID NO: 50901 - DNA, 53 bp, Artificial Sequence
  Description of Artificial Sequence: Synthetic casein; inner sequence and 3' sequence
ggacacagcgtacctcaacgtggccgtgcattgactagtacatgaccacttga

SEQ ID NO: 50902 - DNA, 53 bp, Artificial Sequence; identical to SEQ ID NO: 2168
  Description of Artificial Sequence: Synthetic casein; inner sequence and 3' sequence

SEQ ID NO: 50903 - DNA, 53 bp, Artificial Sequence; identical to SEQ ID NO: 2103
  Description of Artificial Sequence: Synthetic casein; inner sequence and 3' sequence

SEQ ID NO: 50904 - DNA, 53 bp, Artificial Sequence; identical to SEQ ID NO: 30948
  Description of Artificial Sequence: Synthetic casein; inner sequence and 3' sequence

SEQ ID NO: 50905 - DNA, 51 bp, Artificial Sequence
  Description of Artificial Sequence: Synthetic casein; inner sequence and 3' sequence
gtcatgcacgaacactatcatggcggcattgactagtacatgaccacttga

SEQ ID NO: 50906 - DNA, 53 bp, Artificial Sequence
  Description of Artificial Sequence: Synthetic casein; inner sequence and 3' sequence
cacgcatgtcgcatcgtccctaccgtcacgttgactagtacatgaccacttga

SEQ ID NO: 50907 - DNA, 53 bp, Artificial Sequence
  Description of Artificial Sequence: Synthetic casein; inner sequence and 3' sequence
gcgatgcggtacgtcacactgtccgccacattgactagtacatgaccacttga

SEQ ID NO: 50908 - DNA, 53 bp, Artificial Sequence; identical to SEQ ID NO: 30771
  Description of Artificial Sequence: Synthetic casein; inner sequence and 3' sequence

SEQ ID NO: 50909 - DNA, 53 bp, Artificial Sequence
  Description of Artificial Sequence: Synthetic casein; inner sequence and 3' sequence
ggacgcaacgtaccgtatcgtgaccatgtattgactagtacatgaccacttga

SEQ ID NO: 50910 - DNA, 53 bp, Artificial Sequence
  Description of Artificial Sequence: Synthetic casein; inner sequence and 3' sequence
ggcattcacgcacctacacgtgggcacgtattgactagtacatgaccacttga

SEQ ID NO: 50911 - DNA, 51 bp, Artificial Sequence; identical to SEQ ID NO: 2423
  Description of Artificial Sequence: Synthetic casein; inner sequence and 3' sequence

SEQ ID NO: 50912 - DNA, 53 bp, Artificial Sequence; identical to SEQ ID NO: 2437
  Description of Artificial Sequence: Synthetic casein; inner sequence and 3' sequence

SEQ ID NO: 50913 - DNA, 53 bp, Artificial Sequence; identical to SEQ ID NO: 46825
  Description of Artificial Sequence: Synthetic casein; inner sequence and 3' sequence

SEQ ID NO: 50914 - DNA, 53 bp, Artificial Sequence; identical to SEQ ID NO: 22269
  Description of Artificial Sequence: Synthetic casein; inner sequence and 3' sequence

SEQ ID NO: 50915 - DNA, 53 bp, Artificial Sequence; identical to SEQ ID NO: 6898
  Description of Artificial Sequence: Synthetic casein; inner sequence and 3' sequence

SEQ ID NO: 50916 - DNA, 53 bp, Artificial Sequence
  Description of Artificial Sequence: Synthetic casein; inner sequence and 3' sequence
ggacgcaacgtaccgtatcgcggccatgtgttgactagtacatgaccacttga

SEQ ID NO: 50917 - DNA, 53 bp, Artificial Sequence
  Description of Artificial Sequence: Synthetic casein; inner sequence and 3' sequence
ggacgcaacgtaccgtatcgtgggcatgtgttgactagtacatgaccacttga

SEQ ID NO: 50918 - DNA, 53 bp, Artificial Sequence; identical to SEQ ID NO: 46905
  Description of Artificial Sequence: Synthetic casein; inner sequence and 3' sequence

SEQ ID NO: 50919 - DNA, 53 bp, Artificial Sequence
  Description of Artificial Sequence: Synthetic casein; inner sequence and 3' sequence
ggatgcaacgtaccgtatcgtggccatgtgttgactagtacatgaccacttga

SEQ ID NO: 50920 - DNA, 53 bp, Artificial Sequence; identical to SEQ ID NO: 2080
  Description of Artificial Sequence: Synthetic casein; inner sequence and 3' sequence

SEQ ID NO: 50921 - DNA, 53 bp, Artificial Sequence
  Description of Artificial Sequence: Synthetic casein; inner sequence and 3' sequence
ggacacaacgtaccgtatcgtggccatgtgttgactagtacatgaccacttga

SEQ ID NO: 50922 - DNA, 53 bp, Artificial Sequence; identical to SEQ ID NO: 46993
  Description of Artificial Sequence: Synthetic casein; inner sequence and 3' sequence

SEQ ID NO: 50923 - DNA, 53 bp, Artificial Sequence
  Description of Artificial Sequence: Synthetic casein; inner sequence and 3' sequence
cgtgacacggtacgcatcgtatgtgtgatgttgactagtacatgaccacttga

SEQ ID NO: 50924 - DNA, 53 bp, Artificial Sequence
  Description of Artificial Sequence: Synthetic casein; inner sequence and 3' sequence
gacgtaacgcgttacggtgtcgcatgcacgttgactagtacatgaccacttga

SEQ ID NO: 50925 - DNA, 53 bp, Artificial Sequence; identical to SEQ ID NO: 46737
  Description of Artificial Sequence: Synthetic casein; inner sequence and 3' sequence

SEQ ID NO: 50926 - DNA, 53 bp, Artificial Sequence; identical to SEQ ID NO: 2311
  Description of Artificial Sequence: Synthetic casein; inner sequence and 3' sequence

SEQ ID NO: 50927 - DNA, 53 bp, Artificial Sequence; identical to SEQ ID NO: 14996
  Description of Artificial Sequence: Synthetic casein; inner sequence and 3' sequence

SEQ ID NO: 50928 - DNA, 53 bp, Artificial Sequence
  Description of Artificial Sequence: Synthetic casein; inner sequence and 3' sequence
ggccacagcgtaacgttcgagtggtacgtattgactagtacatgaccacttga

SEQ ID NO: 50929 - DNA, 53 bp, Artificial Sequence; identical to SEQ ID NO: 46650
  Description of Artificial Sequence: Synthetic casein; inner sequence and 3' sequence

SEQ ID NO: 50930 - DNA, 53 bp, Artificial Sequence; identical to SEQ ID NO: 30830
  Description of Artificial Sequence: Synthetic casein; inner sequence and 3' sequence

SEQ ID NO: 50931 - DNA, 53 bp, Artificial Sequence
  Description of Artificial Sequence: Synthetic casein; inner sequence and 3' sequence
gcacacggtacgtacggcacgatatgcgcgttgactagtacatgaccacttga

SEQ ID NO: 50932 - DNA, 53 bp, Artificial Sequence
  Description of Artificial Sequence: Synthetic casein; inner sequence and 3' sequence
gcacgactcgcaccctatcatgaggccatattgactagtacatgaccacttga

SEQ ID NO: 50933 - DNA, 53 bp, Artificial Sequence
  Description of Artificial Sequence: Synthetic casein; inner sequence and 3' sequence
cacgcaatgacgtgtgagcatgacgtcgcgttgactagtacatgaccacttga

SEQ ID NO: 50934 - DNA, 53 bp, Artificial Sequence; identical to SEQ ID NO: 30674
  Description of Artificial Sequence: Synthetic casein; inner sequence and 3' sequence

SEQ ID NO: 50935 - DNA, 53 bp, Artificial Sequence; identical to SEQ ID NO: 18627
  Description of Artificial Sequence: Synthetic casein; inner sequence and 3' sequence

SEQ ID NO: 50936 - DNA, 53 bp, Artificial Sequence; identical to SEQ ID NO: 2365
  Description of Artificial Sequence: Synthetic casein; inner sequence and 3' sequence

SEQ ID NO: 50937 - DNA, 53 bp, Artificial Sequence; identical to SEQ ID NO: 22787
  Description of Artificial Sequence: Synthetic casein; inner sequence and 3' sequence

SEQ ID NO: 50938 - DNA, 53 bp, Artificial Sequence
  Description of Artificial Sequence: Synthetic casein; inner sequence and 3' sequence
cgatacgcgtcacgatacgtagcatgcgcattgactagtacatgaccacttga

SEQ ID NO: 50939 - DNA, 53 bp, Artificial Sequence
  Description of Artificial Sequence: Synthetic casein; inner sequence and 3' sequence
cgacacgatgcatgcgtaccgtctgcaccattgactagtacatgaccacttga

SEQ ID NO: 50940 - DNA, 53 bp, Artificial Sequence; identical to SEQ ID NO: 22964
  Description of Artificial Sequence: Synthetic casein; inner sequence and 3' sequence

SEQ ID NO: 50941 - DNA, 53 bp, Artificial Sequence; identical to SEQ ID NO: 22708
  Description of Artificial Sequence: Synthetic casein; inner sequence and 3' sequence

SEQ ID NO: 50942 - DNA, 52 bp, Artificial Sequence; identical to SEQ ID NO: 2193
  Description of Artificial Sequence: Synthetic casein; inner sequence and 3' sequence

SEQ ID NO: 50943 - DNA, 53 bp, Artificial Sequence; identical to SEQ ID NO: 34379
  Description of Artificial Sequence: Synthetic casein; inner sequence and 3' sequence

SEQ ID NO: 50944 - DNA, 53 bp, Artificial Sequence
  Description of Artificial Sequence: Synthetic casein; inner sequence and 3' sequence
cgtcacgcaaggagggacatgtgcttcgcgttgactagtacatgaccacttga

SEQ ID NO: 50945 - DNA, 51 bp, Artificial Sequence
  Description of Artificial Sequence: Synthetic casein; inner sequence and 3' sequence
ggacgcaacgtaacgtatcgtggccatgttgactagtacatgaccacttga

SEQ ID NO: 50946 - DNA, 53 bp, Artificial Sequence
  Description of Artificial Sequence: Synthetic casein; inner sequence and 3' sequence
gcgatcgcaacgcaacgtgtgtacgtatcgttgactagtacatgaccacttga

SEQ ID NO: 50947 - DNA, 53 bp, Artificial Sequence
  Description of Artificial Sequence: Synthetic casein; inner sequence and 3' sequence
gcacgtcacgccctgatgtgtcacggcacattgactagtacatgaccacttga

SEQ ID NO: 50948 - DNA, 53 bp, Artificial Sequence; identical to SEQ ID NO: 46583
  Description of Artificial Sequence: Synthetic casein; inner sequence and 3' sequence

SEQ ID NO: 50949 - DNA, 53 bp, Artificial Sequence; identical to SEQ ID NO: 46918
  Description of Artificial Sequence: Synthetic casein; inner sequence and 3' sequence

SEQ ID NO: 50950 - DNA, 53 bp, Artificial Sequence
  Description of Artificial Sequence: Synthetic casein; inner sequence and 3' sequence
tcacgactcgcaccctatcatgtaggcatgttgactagtacatgaccacttga

SEQ ID NO: 50951 - DNA, 53 bp, Artificial Sequence; identical to SEQ ID NO: 22475
  Description of Artificial Sequence: Synthetic casein; inner sequence and 3' sequence

SEQ ID NO: 50952 - DNA, 53 bp, Artificial Sequence; identical to SEQ ID NO: 46864
  Description of Artificial Sequence: Synthetic casein; inner sequence and 3' sequence

SEQ ID NO: 50953 - DNA, 53 bp, Artificial Sequence
  Description of Artificial Sequence: Synthetic casein; inner sequence and 3' sequence
catgcgcagtgacgtacgtgcatgttcatgttgactagtacatgaccacttga

SEQ ID NO: 50954 - DNA, 53 bp, Artificial Sequence
  Description of Artificial Sequence: Synthetic casein; inner sequence and 3' sequence
ggccacaacgtacctcaacgtggacgtgcattgactagtacatgaccacttga

SEQ ID NO: 50955 - DNA, 53 bp, Artificial Sequence; identical to SEQ ID NO: 22691
  Description of Artificial Sequence: Synthetic casein; inner sequence and 3' sequence

SEQ ID NO: 50956 - DNA, 51 bp, Artificial Sequence
  Description of Artificial Sequence: Synthetic casein; inner sequence and 3' sequence
ggactcaacgtaccgtatcgtggccatgttgactagtacatgaccacttga

SEQ ID NO: 50957 - DNA, 53 bp, Artificial Sequence; identical to SEQ ID NO: 34802
  Description of Artificial Sequence: Synthetic casein; inner sequence and 3' sequence

SEQ ID NO: 50958 - DNA, 53 bp, Artificial Sequence; identical to SEQ ID NO: 2203
  Description of Artificial Sequence: Synthetic casein; inner sequence and 3' sequence

SEQ ID NO: 50959 - DNA, 53 bp, Artificial Sequence
  Description of Artificial Sequence: Synthetic casein; inner sequence and 3' sequence
cgtgacgacgtagtgtcctgtcgcatcacgttgactagtacatgaccacttga

SEQ ID NO: 50960 - DNA, 53 bp, Artificial Sequence
  Description of Artificial Sequence: Synthetic casein; inner sequence and 3' sequence
cgacaccacgctacgtcacgttacggcacattgactagtacatgaccacttga

SEQ ID NO: 50961 - DNA, 53 bp, Artificial Sequence
  Description of Artificial Sequence: Synthetic casein; inner sequence and 3' sequence
ccatgcatcgtaacgcatcgtaccggcacgttgactagtacatgaccacttga

SEQ ID NO: 50962 - DNA, 53 bp, Artificial Sequence; identical to SEQ ID NO: 46975
  Description of Artificial Sequence: Synthetic casein; inner sequence and 3' sequence

SEQ ID NO: 50963 - DNA, 53 bp, Artificial Sequence; identical to SEQ ID NO: 2449
  Description of Artificial Sequence: Synthetic casein; inner sequence and 3' sequence

SEQ ID NO: 50964 - DNA, 53 bp, Artificial Sequence
  Description of Artificial Sequence: Synthetic casein; inner sequence and 3' sequence
ggacgcaacgtaccgcatcgtggccatgcgttgactagtacatgaccacttga

SEQ ID NO: 50965 - DNA, 53 bp, Artificial Sequence; identical to SEQ ID NO: 46804
  Description of Artificial Sequence: Synthetic casein; inner sequence and 3' sequence

SEQ ID NO: 50966 - DNA, 53 bp, Artificial Sequence
  Description of Artificial Sequence: Synthetic casein; inner sequence and 3' sequence
cgatacgcgtaaggcaatgcgtactgcacgttgactagtacatgaccacttga

SEQ ID NO: 50967 - DNA, 53 bp, Artificial Sequence; identical to SEQ ID NO: 2178
  Description of Artificial Sequence: Synthetic casein; inner sequence and 3' sequence

SEQ ID NO: 50968 - DNA, 53 bp, Artificial Sequence
  Description of Artificial Sequence: Synthetic casein; inner sequence and 3' sequence
gcgtcacggaccgtacgttgtcactgcgtattgactagtacatgaccacttga

SEQ ID NO: 50969 - DNA, 53 bp, Artificial Sequence; identical to SEQ ID NO: 30574
  Description of Artificial Sequence: Synthetic casein; inner sequence and 3' sequence

SEQ ID NO: 50970 - DNA, 51 bp, Artificial Sequence
  Description of Artificial Sequence: Synthetic casein; inner sequence and 3' sequence
ggacgcaccgtaccgtatcgtggccatgttgactagtacatgaccacttga

SEQ ID NO: 50971 - DNA, 53 bp, Artificial Sequence; identical to SEQ ID NO: 2024
  Description of Artificial Sequence: Synthetic casein; inner sequence and 3' sequence

SEQ ID NO: 50972 - DNA, 53 bp, Artificial Sequence; identical to SEQ ID NO: 46883
  Description of Artificial Sequence: Synthetic casein; inner sequence and 3' sequence

SEQ ID NO: 50973 - DNA, 53 bp, Artificial Sequence; identical to SEQ ID NO: 18555
  Description of Artificial Sequence: Synthetic casein; inner sequence and 3' sequence

SEQ ID NO: 50974 - DNA, 53 bp, Artificial Sequence
  Description of Artificial Sequence: Synthetic casein; inner sequence and 3' sequence
acgcatcacacgtgtcgtacgtacctcgcgttgactagtacatgaccacttga

SEQ ID NO: 50975 - DNA, 53 bp, Artificial Sequence; identical to SEQ ID NO: 2756
  Description of Artificial Sequence: Synthetic casein; inner sequence and 3' sequence

SEQ ID NO: 50976 - DNA, 53 bp, Artificial Sequence
  Description of Artificial Sequence: Synthetic casein; inner sequence and 3' sequence
gcgtcacgatgatgcgacacggcatgcacattgactagtacatgaccacttga

SEQ ID NO: 50977 - DNA, 53 bp, Artificial Sequence; identical to SEQ ID NO: 22662
  Description of Artificial Sequence: Synthetic casein; inner sequence and 3' sequence

SEQ ID NO: 50978 - DNA, 53 bp, Artificial Sequence
  Description of Artificial Sequence: Synthetic casein; inner sequence and 3' sequence
gcatcgcagcgttacgcactcgacgtgacattgactagtacatgaccacttga

SEQ ID NO: 50979 - DNA, 53 bp, Artificial Sequence
  Description of Artificial Sequence: Synthetic casein; inner sequence and 3' sequence
gcgtgtagcgtcagtgcatgcgatgacacgttgactagtacatgaccacttga

SEQ ID NO: 50980 - DNA, 53 bp, Artificial Sequence; identical to SEQ ID NO: 22801
  Description of Artificial Sequence: Synthetic casein; inner sequence and 3' sequence

SEQ ID NO: 50981 - DNA, 53 bp, Artificial Sequence
  Description of Artificial Sequence: Synthetic casein; inner sequence and 3' sequence
ggacgcagcgtaacgttcgaggggtacgtattgactagtacatgaccacttga

SEQ ID NO: 50982 - DNA, 53 bp, Artificial Sequence
  Description of Artificial Sequence: Synthetic casein; inner sequence and 3' sequence
gcggcacgacgtaacggacacgacgtcacgttgactagtacatgaccacttga

SEQ ID NO: 50983 - DNA, 53 bp, Artificial Sequence
  Description of Artificial Sequence: Synthetic casein; inner sequence and 3' sequence
ggcatgcgaggaacgaggcatgatgcgtcattgactagtacatgaccacttga

SEQ ID NO: 50984 - DNA, 53 bp, Artificial Sequence; identical to SEQ ID NO: 46994
  Description of Artificial Sequence: Synthetic casein; inner sequence and 3' sequence

SEQ ID NO: 50985 - DNA, 53 bp, Artificial Sequence
  Description of Artificial Sequence: Synthetic casein; inner sequence and 3' sequence
gcgatgcacgtaggtggccttgtcgtcacgttgactagtacatgaccacttga

SEQ ID NO: 50986 - DNA, 53 bp, Artificial Sequence; identical to SEQ ID NO: 46971
  Description of Artificial Sequence: Synthetic casein; inner sequence and 3' sequence

SEQ ID NO: 50987 - DNA, 53 bp, Artificial Sequence; identical to SEQ ID NO: 2821
  Description of Artificial Sequence: Synthetic casein; inner sequence and 3' sequence

SEQ ID NO: 50988 - DNA, 53 bp, Artificial Sequence; identical to SEQ ID NO: 46923
  Description of Artificial Sequence: Synthetic casein; inner sequence and 3' sequence

SEQ ID NO: 50989 - DNA, 53 bp, Artificial Sequence; identical to SEQ ID NO: 2154
  Description of Artificial Sequence: Synthetic casein; inner sequence and 3' sequence

SEQ ID NO: 50990 - DNA, 53 bp, Artificial Sequence; identical to SEQ ID NO: 46837
  Description of Artificial Sequence: Synthetic casein; inner sequence and 3' sequence

SEQ ID NO: 50991 - DNA, 54 bp, Artificial Sequence
  Description of Artificial Sequence: Synthetic casein; inner sequence and 3' sequence
cacgtgtcaacgtgcattacgtcgtgacgcgttgactagtacatgaccacttga

SEQ ID NO: 50992 - DNA, 53 bp, Artificial Sequence
  Description of Artificial Sequence: Synthetic casein; inner sequence and 3' sequence
gcacgatgcaacgcgtgtcctcgcgtcacgttgactagtacatgaccacttga

SEQ ID NO: 50993 - DNA, 53 bp, Artificial Sequence
  Description of Artificial Sequence: Synthetic casein; inner sequence and 3' sequence
ggacgcaacgtaccgtatcgtggccacgtattgactagtacatgaccacttga

SEQ ID NO: 50994 - DNA, 53 bp, Artificial Sequence
  Description of Artificial Sequence: Synthetic casein; inner sequence and 3' sequence
gcacatgcgacagtacgtacgtatcgcaccttgactagtacatgaccacttga

SEQ ID NO: 50995 - DNA, 53 bp, Artificial Sequence
  Description of Artificial Sequence: Synthetic casein; inner sequence and 3' sequence
acgtacacgtaaggcatcacgtacttcgcattgactagtacatgaccacttga

SEQ ID NO: 50996 - DNA, 53 bp, Artificial Sequence
  Description of Artificial Sequence: Synthetic casein; inner sequence and 3' sequence
gtcacgcacgaacactatcatggcggcatgttgactagtacatgaccacttga

SEQ ID NO: 50997 - DNA, 53 bp, Artificial Sequence
  Description of Artificial Sequence: Synthetic casein; inner sequence and 3' sequence
cacgtcacatgcacgacgattcgcgtggtgttgactagtacatgaccacttga

SEQ ID NO: 50998 - DNA, 53 bp, Artificial Sequence; identical to SEQ ID NO: 2531
  Description of Artificial Sequence: Synthetic casein; inner sequence and 3' sequence

SEQ ID NO: 50999 - DNA, 53 bp, Artificial Sequence; identical to SEQ ID NO: 2903
  Description of Artificial Sequence: Synthetic casein; inner sequence and 3' sequence

SEQ ID NO: 51000 - DNA, 53 bp, Artificial Sequence
  Description of Artificial Sequence: Synthetic casein; inner sequence and 3' sequence
cgtgacgcgacgtgacgacatagctgcgtgttgactagtacatgaccacttga

SEQ ID NO: 51001 - DNA, 53 bp, Artificial Sequence
  Description of Artificial Sequence: Synthetic casein; inner sequence and 3' sequence
gcgttacgtgcatcaggccatcacgttgccttgactagtacatgaccacttga

SEQ ID NO: 51002 - DNA, 51 bp, Artificial Sequence
  Description of Artificial Sequence: Synthetic casein; inner sequence and 3' sequence
gcaacgcacgacacgatgtcacgtcgcgttgactagtacatgaccacttga

SEQ ID NO: 51003 - DNA, 76 bp, Artificial Sequence; identical to SEQ ID NO: 3004
  Description of Artificial Sequence: Synthetic casein; 5' sequence + inner sequence + 3' sequence

SEQ ID NO: 51004 - DNA, 76 bp, Artificial Sequence; identical to SEQ ID NO: 3003
  Description of Artificial Sequence: Synthetic casein; 5' sequence + inner sequence + 3' sequence

SEQ ID NO: 51005 - DNA, 76 bp, Artificial Sequence; identical to SEQ ID NO: 3021
  Description of Artificial Sequence: Synthetic casein; 5' sequence + inner sequence + 3' sequence

SEQ ID NO: 51006 - DNA, 76 bp, Artificial Sequence; identical to SEQ ID NO: 3006
  Description of Artificial Sequence: Synthetic casein; 5' sequence + inner sequence + 3' sequence

SEQ ID NO: 51007 - DNA, 76 bp, Artificial Sequence; identical to SEQ ID NO: 3052
  Description of Artificial Sequence: Synthetic casein; 5' sequence + inner sequence + 3' sequence

SEQ ID NO: 51008 - DNA, 76 bp, Artificial Sequence; identical to SEQ ID NO: 3010
  Description of Artificial Sequence: Synthetic casein; 5' sequence + inner sequence + 3' sequence

SEQ ID NO: 51009 - DNA, 76 bp, Artificial Sequence; identical to SEQ ID NO: 3020
  Description of Artificial Sequence: Synthetic casein; 5' sequence + inner sequence + 3' sequence

SEQ ID NO: 51010 - DNA, 76 bp, Artificial Sequence; identical to SEQ ID NO: 3005
  Description of Artificial Sequence: Synthetic casein; 5' sequence + inner sequence + 3' sequence

SEQ ID NO: 51011 - DNA, 76 bp, Artificial Sequence; identical to SEQ ID NO: 3008
  Description of Artificial Sequence: Synthetic casein; 5' sequence + inner sequence + 3' sequence

SEQ ID NO: 51012 - DNA, 76 bp, Artificial Sequence; identical to SEQ ID NO: 3007
  Description of Artificial Sequence: Synthetic casein; 5' sequence + inner sequence + 3' sequence

SEQ ID NO: 51013 - DNA, 76 bp, Artificial Sequence; identical to SEQ ID NO: 3081
  Description of Artificial Sequence: Synthetic casein; 5' sequence + inner sequence + 3' sequence

SEQ ID NO: 51014 - DNA, 76 bp, Artificial Sequence; identical to SEQ ID NO: 3011
  Description of Artificial Sequence: Synthetic casein; 5' sequence + inner sequence + 3' sequence

SEQ ID NO: 51015 - DNA, 74 bp, Artificial Sequence; identical to SEQ ID NO: 3241
  Description of Artificial Sequence: Synthetic casein; 5' sequence + inner sequence + 3' sequence

SEQ ID NO: 51016 - DNA, 76 bp, Artificial Sequence; identical to SEQ ID NO: 3201
  Description of Artificial Sequence: Synthetic casein; 5' sequence + inner sequence + 3' sequence

SEQ ID NO: 51017 - DNA, 76 bp, Artificial Sequence; identical to SEQ ID NO: 3033
  Description of Artificial Sequence: Synthetic casein; 5' sequence + inner sequence + 3' sequence

SEQ ID NO: 51018 - DNA, 76 bp, Artificial Sequence; identical to SEQ ID NO: 3030
  Description of Artificial Sequence: Synthetic casein; 5' sequence + inner sequence + 3' sequence

SEQ ID NO: 51019 - DNA, 76 bp, Artificial Sequence; identical to SEQ ID NO: 3220
  Description of Artificial Sequence: Synthetic casein; 5' sequence + inner sequence + 3' sequence

SEQ ID NO: 51020 - DNA, 76 bp, Artificial Sequence; identical to SEQ ID NO: 3040
  Description of Artificial Sequence: Synthetic casein; 5' sequence + inner sequence + 3' sequence

SEQ ID NO: 51021 - DNA, 76 bp, Artificial Sequence; identical to SEQ ID NO: 3009
  Description of Artificial Sequence: Synthetic casein; 5' sequence + inner sequence + 3' sequence

SEQ ID NO: 51022 - DNA, 76 bp, Artificial Sequence; identical to SEQ ID NO: 3023
  Description of Artificial Sequence: Synthetic casein; 5' sequence + inner sequence + 3' sequence

SEQ ID NO: 51023 - DNA, 76 bp, Artificial Sequence; identical to SEQ ID NO: 3046
  Description of Artificial Sequence: Synthetic casein; 5' sequence + inner sequence + 3' sequence

SEQ ID NO: 51024 - DNA, 76 bp, Artificial Sequence; identical to SEQ ID NO: 3279
  Description of Artificial Sequence: Synthetic casein; 5' sequence + inner sequence + 3' sequence

SEQ ID NO: 51025 - DNA, 76 bp, Artificial Sequence; identical to SEQ ID NO: 19640
  Description of Artificial Sequence: Synthetic casein; 5' sequence + inner sequence + 3' sequence

SEQ ID NO: 51026 - DNA, 76 bp, Artificial Sequence; identical to SEQ ID NO: 3028
  Description of Artificial Sequence: Synthetic casein; 5' sequence + inner sequence + 3' sequence

SEQ ID NO: 51027 - DNA, 76 bp, Artificial Sequence; identical to SEQ ID NO: 3078
  Description of Artificial Sequence: Synthetic casein; 5' sequence + inner sequence + 3' sequence

SEQ ID NO: 51028 - DNA, 76 bp, Artificial Sequence; identical to SEQ ID NO: 3012
  Description of Artificial Sequence: Synthetic casein; 5' sequence + inner sequence + 3' sequence

SEQ ID NO: 51029 - DNA, 76 bp, Artificial Sequence; identical to SEQ ID NO: 3014
  Description of Artificial Sequence: Synthetic casein; 5' sequence + inner sequence + 3' sequence

SEQ ID NO: 51030 - DNA, 76 bp, Artificial Sequence; identical to SEQ ID NO: 3036
  Description of Artificial Sequence: Synthetic casein; 5' sequence + inner sequence + 3' sequence

SEQ ID NO: 51031 - DNA, 76 bp, Artificial Sequence; identical to SEQ ID NO: 3079
  Description of Artificial Sequence: Synthetic casein; 5' sequence + inner sequence + 3' sequence

SEQ ID NO: 51032 - DNA, 76 bp, Artificial Sequence; identical to SEQ ID NO: 31278
  Description of Artificial Sequence: Synthetic casein; 5' sequence + inner sequence + 3' sequence

SEQ ID NO: 51033 - DNA, 76 bp, Artificial Sequence; identical to SEQ ID NO: 3041
  Description of Artificial Sequence: Synthetic casein; 5' sequence + inner sequence + 3' sequence

SEQ ID NO: 51034 - DNA, 76 bp, Artificial Sequence; identical to SEQ ID NO: 3526
  Description of Artificial Sequence: Synthetic casein; 5' sequence + inner sequence + 3' sequence

SEQ ID NO: 51035 - DNA, 76 bp, Artificial Sequence; identical to SEQ ID NO: 3506
  Description of Artificial Sequence: Synthetic casein; 5' sequence + inner sequence + 3' sequence

SEQ ID NO: 51036 - DNA, 76 bp, Artificial Sequence; identical to SEQ ID NO: 31199
  Description of Artificial Sequence: Synthetic casein; 5' sequence + inner sequence + 3' sequence

SEQ ID NO: 51037 - DNA, 76 bp, Artificial Sequence; identical to SEQ ID NO: 3458
  Description of Artificial Sequence: Synthetic casein; 5' sequence + inner sequence + 3' sequence

SEQ ID NO: 51038 - DNA, 76 bp, Artificial Sequence; identical to SEQ ID NO: 7659
  Description of Artificial Sequence: Synthetic casein; 5' sequence + inner sequence + 3' sequence

SEQ ID NO: 51039 - DNA, 76 bp, Artificial Sequence; identical to SEQ ID NO: 31208
  Description of Artificial Sequence: Synthetic casein; 5' sequence + inner sequence + 3' sequence

SEQ ID NO: 51040 - DNA, 76 bp, Artificial Sequence; identical to SEQ ID NO: 3108
  Description of Artificial Sequence: Synthetic casein; 5' sequence + inner sequence + 3' sequence

SEQ ID NO: 51041 - DNA, 76 bp, Artificial Sequence; identical to SEQ ID NO: 3015
  Description of Artificial Sequence: Synthetic casein; 5' sequence + inner sequence + 3' sequence

SEQ ID NO: 51042 - DNA, 76 bp, Artificial Sequence; identical to SEQ ID NO: 31252
  Description of Artificial Sequence: Synthetic casein; 5' sequence + inner sequence + 3' sequence

SEQ ID NO: 51043 - DNA, 76 bp, Artificial Sequence; identical to SEQ ID NO: 23495
  Description of Artificial Sequence: Synthetic casein; 5' sequence + inner sequence + 3' sequence

SEQ ID NO: 51044 - DNA, 76 bp, Artificial Sequence; identical to SEQ ID NO: 3381
  Description of Artificial Sequence: Synthetic casein; 5' sequence + inner sequence + 3' sequence

SEQ ID NO: 51045 - DNA, 76 bp, Artificial Sequence; identical to SEQ ID NO: 3323
  Description of Artificial Sequence: Synthetic casein; 5' sequence + inner sequence + 3' sequence

SEQ ID NO: 51046 - DNA, 76 bp, Artificial Sequence; identical to SEQ ID NO: 23468
  Description of Artificial Sequence: Synthetic casein; 5' sequence + inner sequence + 3' sequence

SEQ ID NO: 51047 - DNA, 76 bp, Artificial Sequence; identical to SEQ ID NO: 3281
  Description of Artificial Sequence: Synthetic casein; 5' sequence + inner sequence + 3' sequence

SEQ ID NO: 51048 - DNA, 75 bp, Artificial Sequence; identical to SEQ ID NO: 3070
  Description of Artificial Sequence: Synthetic casein; 5' sequence + inner sequence + 3' sequence

SEQ ID NO: 51049 - DNA, 76 bp, Artificial Sequence; identical to SEQ ID NO: 3071
  Description of Artificial Sequence: Synthetic casein; 5' sequence + inner sequence + 3' sequence

SEQ ID NO: 51050 - DNA, 76 bp, Artificial Sequence; identical to SEQ ID NO: 3013
  Description of Artificial Sequence: Synthetic casein; 5' sequence + inner sequence + 3' sequence

SEQ ID NO: 51051 - DNA, 76 bp, Artificial Sequence; identical to SEQ ID NO: 19818
  Description of Artificial Sequence: Synthetic casein; 5' sequence + inner sequence + 3' sequence

SEQ ID NO: 51052 - DNA, 77 bp, Artificial Sequence; identical to SEQ ID NO: 19373
  Description of Artificial Sequence: Synthetic casein; 5' sequence + inner sequence + 3' sequence

SEQ ID NO: 51053 - DNA, 76 bp, Artificial Sequence; identical to SEQ ID NO: 3045
  Description of Artificial Sequence: Synthetic casein; 5' sequence + inner sequence + 3' sequence

SEQ ID NO: 51054 - DNA, 76 bp, Artificial Sequence; identical to SEQ ID NO: 3121
  Description of Artificial Sequence: Synthetic casein; 5' sequence + inner sequence + 3' sequence

SEQ ID NO: 51055 - DNA, 76 bp, Artificial Sequence; identical to SEQ ID NO: 31108
  Description of Artificial Sequence: Synthetic casein; 5' sequence + inner sequence + 3' sequence

SEQ ID NO: 51056 - DNA, 76 bp, Artificial Sequence; identical to SEQ ID NO: 3359
  Description of Artificial Sequence: Synthetic casein; 5' sequence + inner sequence + 3' sequence

SEQ ID NO: 51057 - DNA, 76 bp, Artificial Sequence; identical to SEQ ID NO: 23540
  Description of Artificial Sequence: Synthetic casein; 5' sequence + inner sequence + 3' sequence

SEQ ID NO: 51058 - DNA, 76 bp, Artificial Sequence; identical to SEQ ID NO: 31436
  Description of Artificial Sequence: Synthetic casein; 5' sequence + inner sequence + 3' sequence

SEQ ID NO: 51059 - DNA, 76 bp, Artificial Sequence; identical to SEQ ID NO: 23917
  Description of Artificial Sequence: Synthetic casein; 5' sequence + inner sequence + 3' sequence

SEQ ID NO: 51060 - DNA, 76 bp, Artificial Sequence; identical to SEQ ID NO: 3491
  Description of Artificial Sequence: Synthetic casein; 5' sequence + inner sequence + 3' sequence

SEQ ID NO: 51061 - DNA, 76 bp, Artificial Sequence; identical to SEQ ID NO: 47212
  Description of Artificial Sequence: Synthetic casein; 5' sequence + inner sequence + 3' sequence

SEQ ID NO: 51062 - DNA, 75 bp, Artificial Sequence; identical to SEQ ID NO: 47164
  Description of Artificial Sequence: Synthetic casein; 5' sequence + inner sequence + 3' sequence

SEQ ID NO: 51063 - DNA, 76 bp, Artificial Sequence; identical to SEQ ID NO: 3035
  Description of Artificial Sequence: Synthetic casein; 5' sequence + inner sequence + 3' sequence

SEQ ID NO: 51064 - DNA, 76 bp, Artificial Sequence; identical to SEQ ID NO: 19266
  Description of Artificial Sequence: Synthetic casein; 5' sequence + inner sequence + 3' sequence

SEQ ID NO: 51065 - DNA, 76 bp, Artificial Sequence; identical to SEQ ID NO: 3025
  Description of Artificial Sequence: Synthetic casein; 5' sequence + inner sequence + 3' sequence

SEQ ID NO: 51066 - DNA, 76 bp, Artificial Sequence; identical to SEQ ID NO: 31526
  Description of Artificial Sequence: Synthetic casein; 5' sequence + inner sequence + 3' sequence

SEQ ID NO: 51067 - DNA, 76 bp, Artificial Sequence; identical to SEQ ID NO: 3018
  Description of Artificial Sequence: Synthetic casein; 5' sequence + inner sequence + 3' sequence

SEQ ID NO: 51068 - DNA, 76 bp, Artificial Sequence; identical to SEQ ID NO: 19837
  Description of Artificial Sequence: Synthetic casein; 5' sequence + inner sequence + 3' sequence

SEQ ID NO: 51069 - DNA, 76 bp, Artificial Sequence; identical to SEQ ID NO: 3340
  Description of Artificial Sequence: Synthetic casein; 5' sequence + inner sequence + 3' sequence

SEQ ID NO: 51070 - DNA, 76 bp, Artificial Sequence; identical to SEQ ID NO: 31477
  Description of Artificial Sequence: Synthetic casein; 5' sequence + inner sequence + 3' sequence

SEQ ID NO: 51071 - DNA, 76 bp, Artificial Sequence; identical to SEQ ID NO: 3017
  Description of Artificial Sequence: Synthetic casein; 5' sequence + inner sequence + 3' sequence

SEQ ID NO: 51072 - DNA, 76 bp, Artificial Sequence; identical to SEQ ID NO: 31699
  Description of Artificial Sequence: Synthetic casein; 5' sequence + inner sequence + 3' sequence

SEQ ID NO: 51073 - DNA, 76 bp, Artificial Sequence; identical to SEQ ID NO: 23105
  Description of Artificial Sequence: Synthetic casein; 5' sequence + inner sequence + 3' sequence

SEQ ID NO: 51074 - DNA, 76 bp, Artificial Sequence; identical to SEQ ID NO: 3746
  Description of Artificial Sequence: Synthetic casein; 5' sequence + inner sequence + 3' sequence

SEQ ID NO: 51075 - DNA, 76 bp, Artificial Sequence; identical to SEQ ID NO: 47219
  Description of Artificial Sequence: Synthetic casein; 5' sequence + inner sequence + 3' sequence

SEQ ID NO: 51076 - DNA, 76 bp, Artificial Sequence; identical to SEQ ID NO: 3039
  Description of Artificial Sequence: Synthetic casein; 5' sequence + inner sequence + 3' sequence

SEQ ID NO: 51077 - DNA, 76 bp, Artificial Sequence; identical to SEQ ID NO: 31147
  Description of Artificial Sequence: Synthetic casein; 5' sequence + inner sequence + 3' sequence

SEQ ID NO: 51078 - DNA, 76 bp, Artificial Sequence; identical to SEQ ID NO: 3053
  Description of Artificial Sequence: Synthetic casein; 5' sequence + inner sequence + 3' sequence

SEQ ID NO: 51079 - DNA, 76 bp, Artificial Sequence; identical to SEQ ID NO: 31382
  Description of Artificial Sequence: Synthetic casein; 5' sequence + inner sequence + 3' sequence

SEQ ID NO: 51080 - DNA, 76 bp, Artificial Sequence; identical to SEQ ID NO: 31320
  Description of Artificial Sequence: Synthetic casein; 5' sequence + inner sequence + 3' sequence

SEQ ID NO: 51081 - DNA, 76 bp, Artificial Sequence; identical to SEQ ID NO: 3066
  Description of Artificial Sequence: Synthetic casein; 5' sequence + inner sequence + 3' sequence

SEQ ID NO: 51082 - DNA, 76 bp, Artificial Sequence; identical to SEQ ID NO: 31381
  Description of Artificial Sequence: Synthetic casein; 5' sequence + inner sequence + 3' sequence

SEQ ID NO: 51083 - DNA, 76 bp, Artificial Sequence; identical to SEQ ID NO: 31541
  Description of Artificial Sequence: Synthetic casein; 5' sequence + inner sequence + 3' sequence

SEQ ID NO: 51084 - DNA, 76 bp, Artificial Sequence; identical to SEQ ID NO: 31751
  Description of Artificial Sequence: Synthetic casein; 5' sequence + inner sequence + 3' sequence

SEQ ID NO: 51085 - DNA, 76 bp, Artificial Sequence; identical to SEQ ID NO: 31425
  Description of Artificial Sequence: Synthetic casein; 5' sequence + inner sequence + 3' sequence

SEQ ID NO: 51086 - DNA, 77 bp, Artificial Sequence; identical to SEQ ID NO: 3971
  Description of Artificial Sequence: Synthetic casein; 5' sequence + inner sequence + 3' sequence

SEQ ID NO: 51087 - DNA, 76 bp, Artificial Sequence; identical to SEQ ID NO: 3067
  Description of Artificial Sequence: Synthetic casein; 5' sequence + inner sequence + 3' sequence

SEQ ID NO: 51088 - DNA, 76 bp, Artificial Sequence; identical to SEQ ID NO: 3174
  Description of Artificial Sequence: Synthetic casein; 5' sequence + inner sequence + 3' sequence

SEQ ID NO: 51089 - DNA, 76 bp, Artificial Sequence; identical to SEQ ID NO: 19211
  Description of Artificial Sequence: Synthetic casein; 5' sequence + inner sequence + 3' sequence

SEQ ID NO: 51090 - DNA, 76 bp, Artificial Sequence; identical to SEQ ID NO: 3517
  Description of Artificial Sequence: Synthetic casein; 5' sequence + inner sequence + 3' sequence

SEQ ID NO: 51091 - DNA, 76 bp, Artificial Sequence; identical to SEQ ID NO: 3231
  Description of Artificial Sequence: Synthetic casein; 5' sequence + inner sequence + 3' sequence

SEQ ID NO: 51092 - DNA, 76 bp, Artificial Sequence; identical to SEQ ID NO: 3063
  Description of Artificial Sequence: Synthetic casein; 5' sequence + inner sequence + 3' sequence

SEQ ID NO: 51093 - DNA, 76 bp, Artificial Sequence; identical to SEQ ID NO: 7627
  Description of Artificial Sequence: Synthetic casein; 5' sequence + inner sequence + 3' sequence

SEQ ID NO: 51094 - DNA, 76 bp, Artificial Sequence; identical to SEQ ID NO: 3054
  Description of Artificial Sequence: Synthetic casein; 5' sequence + inner sequence + 3' sequence

SEQ ID NO: 51095 - DNA, 76 bp, Artificial Sequence; identical to SEQ ID NO: 31379
  Description of Artificial Sequence: Synthetic casein; 5' sequence + inner sequence + 3' sequence

SEQ ID NO: 51096 - DNA, 76 bp, Artificial Sequence; identical to SEQ ID NO: 3442
  Description of Artificial Sequence: Synthetic casein; 5' sequence + inner sequence + 3' sequence

SEQ ID NO: 51097 - DNA, 76 bp, Artificial Sequence; identical to SEQ ID NO: 3049
  Description of Artificial Sequence: Synthetic casein; 5' sequence + inner sequence + 3' sequence

SEQ ID NO: 51098 - DNA, 76 bp, Artificial Sequence; identical to SEQ ID NO: 3145
  Description of Artificial Sequence: Synthetic casein; 5' sequence + inner sequence + 3' sequence

SEQ ID NO: 51099 - DNA, 76 bp, Artificial Sequence; identical to SEQ ID NO: 3283
  Description of Artificial Sequence: Synthetic casein; 5' sequence + inner sequence + 3' sequence

SEQ ID NO: 51100 - DNA, 70 bp, Artificial Sequence
  Description of Artificial Sequence: Synthetic casein; 5' sequence + inner sequence + 3' sequence
tagggaagagaaggacatatgatgcgtcacggcatacgtactgcgcattgactagtacatgaccacttga

SEQ ID NO: 51101 - DNA, 76 bp, Artificial Sequence; identical to SEQ ID NO: 3184
  Description of Artificial Sequence: Synthetic casein; 5' sequence + inner sequence + 3' sequence

SEQ ID NO: 51102 - DNA, 76 bp, Artificial Sequence; identical to SEQ ID NO: 31310
  Description of Artificial Sequence: Synthetic casein; 5' sequence + inner sequence + 3' sequence

SEQ ID NO: 51103 - DNA, 76 bp, Artificial Sequence; identical to SEQ ID NO: 23524
  Description of Artificial Sequence: Synthetic casein; 5' sequence + inner sequence + 3' sequence

SEQ ID NO: 51104 - DNA, 76 bp, Artificial Sequence; identical to SEQ ID NO: 3419
  Description of Artificial Sequence: Synthetic casein; 5' sequence + inner sequence + 3' sequence

SEQ ID NO: 51105 - DNA, 76 bp, Artificial Sequence; identical to SEQ ID NO: 3059
  Description of Artificial Sequence: Synthetic casein; 5' sequence + inner sequence + 3' sequence

SEQ ID NO: 51106 - DNA, 75 bp, Artificial Sequence; identical to SEQ ID NO: 31237
  Description of Artificial Sequence: Synthetic casein; 5' sequence + inner sequence + 3' sequence

SEQ ID NO: 51107 - DNA, 76 bp, Artificial Sequence; identical to SEQ ID NO: 19634
  Description of Artificial Sequence: Synthetic casein; 5' sequence + inner sequence + 3' sequence

SEQ ID NO: 51108 - DNA, 76 bp, Artificial Sequence; identical to SEQ ID NO: 3613
  Description of Artificial Sequence: Synthetic casein; 5' sequence + inner sequence + 3' sequence

SEQ ID NO: 51109 - DNA, 76 bp, Artificial Sequence; identical to SEQ ID NO: 31985
  Description of Artificial Sequence: Synthetic casein; 5' sequence + inner sequence + 3' sequence

SEQ ID NO: 51110 - DNA, 76 bp, Artificial Sequence; identical to SEQ ID NO: 3111
  Description of Artificial Sequence: Synthetic casein; 5' sequence + inner sequence + 3' sequence

SEQ ID NO: 51111 - DNA, 76 bp, Artificial Sequence; identical to SEQ ID NO: 23486
  Description of Artificial Sequence: Synthetic casein; 5' sequence + inner sequence + 3' sequence

SEQ ID NO: 51112 - DNA, 76 bp, Artificial Sequence; identical to SEQ ID NO: 15997
  Description of Artificial Sequence: Synthetic casein; 5' sequence + inner sequence + 3' sequence

SEQ ID NO: 51113 - DNA, 76 bp, Artificial Sequence; identical to SEQ ID NO: 19603
  Description of Artificial Sequence: Synthetic casein; 5' sequence + inner sequence + 3' sequence

SEQ ID NO: 51114 - DNA, 76 bp, Artificial Sequence; identical to SEQ ID NO: 3037
  Description of Artificial Sequence: Synthetic casein; 5' sequence + inner sequence + 3' sequence

SEQ ID NO: 51115 - DNA, 76 bp, Artificial Sequence; identical to SEQ ID NO: 47321
  Description of Artificial Sequence: Synthetic casein; 5' sequence + inner sequence + 3' sequence

SEQ ID NO: 51116 - DNA, 76 bp, Artificial Sequence; identical to SEQ ID NO: 31939
  Description of Artificial Sequence: Synthetic casein; 5' sequence + inner sequence + 3' sequence

SEQ ID NO: 51117 - DNA, 76 bp, Artificial Sequence; identical to SEQ ID NO: 31243
  Description of Artificial Sequence: Synthetic casein; 5' sequence + inner sequence + 3' sequence

SEQ ID NO: 51118 - DNA, 76 bp, Artificial Sequence; identical to SEQ ID NO: 7429
  Description of Artificial Sequence: Synthetic casein; 5' sequence + inner sequence + 3' sequence

SEQ ID NO: 51119 - DNA, 76 bp, Artificial Sequence; identical to SEQ ID NO: 3212
  Description of Artificial Sequence: Synthetic casein; 5' sequence + inner sequence + 3' sequence

SEQ ID NO: 51120 - DNA, 76 bp, Artificial Sequence; identical to SEQ ID NO: 3886
  Description of Artificial Sequence: Synthetic casein; 5' sequence + inner sequence + 3' sequence

SEQ ID NO: 51121 - DNA, 76 bp, Artificial Sequence; identical to SEQ ID NO: 3687
  Description of Artificial Sequence: Synthetic casein; 5' sequence + inner sequence + 3' sequence

SEQ ID NO: 51122 - DNA, 76 bp, Artificial Sequence; identical to SEQ ID NO: 47111
  Description of Artificial Sequence: Synthetic casein; 5' sequence + inner sequence + 3' sequence

SEQ ID NO: 51123 - DNA, 76 bp, Artificial Sequence; identical to SEQ ID NO: 47742
  Description of Artificial Sequence: Synthetic casein; 5' sequence + inner sequence + 3' sequence

SEQ ID NO: 51124 - DNA, 76 bp, Artificial Sequence; identical to SEQ ID NO: 47753
  Description of Artificial Sequence: Synthetic casein; 5' sequence + inner sequence + 3' sequence

SEQ ID NO: 51125 - DNA, 76 bp, Artificial Sequence; identical to SEQ ID NO: 3123
  Description of Artificial Sequence: Synthetic casein; 5' sequence + inner sequence + 3' sequence

SEQ ID NO: 51126 - DNA, 76 bp, Artificial Sequence; identical to SEQ ID NO: 31221
  Description of Artificial Sequence: Synthetic casein; 5' sequence + inner sequence + 3' sequence

SEQ ID NO: 51127 - DNA, 76 bp, Artificial Sequence; identical to SEQ ID NO: 3243
  Description of Artificial Sequence: Synthetic casein; 5' sequence + inner sequence + 3' sequence

SEQ ID NO: 51128 - DNA, 76 bp, Artificial Sequence; identical to SEQ ID NO: 31743
  Description of Artificial Sequence: Synthetic casein; 5' sequence + inner sequence + 3' sequence

SEQ ID NO: 51129 - DNA, 76 bp, Artificial Sequence; identical to SEQ ID NO: 3172
  Description of Artificial Sequence: Synthetic casein; 5' sequence + inner sequence + 3' sequence

SEQ ID NO: 51130 - DNA, 76 bp, Artificial Sequence; identical to SEQ ID NO: 47446
  Description of Artificial Sequence: Synthetic casein; 5' sequence + inner sequence + 3' sequence

SEQ ID NO: 51131 - DNA, 76 bp, Artificial Sequence; identical to SEQ ID NO: 23473
  Description of Artificial Sequence: Synthetic casein; 5' sequence + inner sequence + 3' sequence

SEQ ID NO: 51132 - DNA, 76 bp, Artificial Sequence; identical to SEQ ID NO: 47216
  Description of Artificial Sequence: Synthetic casein; 5' sequence + inner sequence + 3' sequence

SEQ ID NO: 51133 - DNA, 76 bp, Artificial Sequence; identical to SEQ ID NO: 3414
  Description of Artificial Sequence: Synthetic casein; 5' sequence + inner sequence + 3' sequence

SEQ ID NO: 51134 - DNA, 76 bp, Artificial Sequence; identical to SEQ ID NO: 3622
  Description of Artificial Sequence: Synthetic casein; 5' sequence + inner sequence + 3' sequence

SEQ ID NO: 51135 - DNA, 76 bp, Artificial Sequence; identical to SEQ ID NO: 47623
  Description of Artificial Sequence: Synthetic casein; 5' sequence + inner sequence + 3' sequence

SEQ ID NO: 51136 - DNA, 76 bp, Artificial Sequence; identical to SEQ ID NO: 19859
  Description of Artificial Sequence: Synthetic casein; 5' sequence + inner sequence + 3' sequence

SEQ ID NO: 51137 - DNA, 76 bp, Artificial Sequence; identical to SEQ ID NO: 7289
  Description of Artificial Sequence: Synthetic casein; 5' sequence + inner sequence + 3' sequence

SEQ ID NO: 51138 - DNA, 76 bp, Artificial Sequence
  Description of Artificial Sequence: Synthetic casein; 5' sequence + inner sequence + 3' sequence
tagggaagagaaggacatatgatgcgacgtggcgcaacggatggacgtacgcattgactagtacatgaccacttga

SEQ ID NO: 51139 - DNA, 76 bp, Artificial Sequence; identical to SEQ ID NO: 3684
  Description of Artificial Sequence: Synthetic casein; 5' sequence + inner sequence + 3' sequence

SEQ ID NO: 51140 - DNA, 76 bp, Artificial Sequence; identical to SEQ ID NO: 47245
  Description of Artificial Sequence: Synthetic casein; 5' sequence + inner sequence + 3' sequence

SEQ ID NO: 51141 - DNA, 76 bp, Artificial Sequence; identical to SEQ ID NO: 3379
  Description of Artificial Sequence: Synthetic casein; 5' sequence + inner sequence + 3' sequence

SEQ ID NO: 51142 - DNA, 76 bp, Artificial Sequence; identical to SEQ ID NO: 3138
  Description of Artificial Sequence: Synthetic casein; 5' sequence + inner sequence + 3' sequence

SEQ ID NO: 51143 - DNA, 76 bp, Artificial Sequence; identical to SEQ ID NO: 3611
  Description of Artificial Sequence: Synthetic casein; 5' sequence + inner sequence + 3' sequence

SEQ ID NO: 51144 - DNA, 76 bp, Artificial Sequence; identical to SEQ ID NO: 31782
  Description of Artificial Sequence: Synthetic casein; 5' sequence + inner sequence + 3' sequence

SEQ ID NO: 51145 - DNA, 76 bp, Artificial Sequence; identical to SEQ ID NO: 31195
  Description of Artificial Sequence: Synthetic casein; 5' sequence + inner sequence + 3' sequence

SEQ ID NO: 51146 - DNA, 76 bp, Artificial Sequence; identical to SEQ ID NO: 3467
  Description of Artificial Sequence: Synthetic casein; 5' sequence + inner sequence + 3' sequence

SEQ ID NO: 51147 - DNA, 76 bp, Artificial Sequence; identical to SEQ ID NO: 47900
  Description of Artificial Sequence: Synthetic casein; 5' sequence + inner sequence + 3' sequence

SEQ ID NO: 51148 - DNA, 76 bp, Artificial Sequence; identical to SEQ ID NO: 31907
  Description of Artificial Sequence: Synthetic casein; 5' sequence + inner sequence + 3' sequence

SEQ ID NO: 51149 - DNA, 76 bp, Artificial Sequence; identical to SEQ ID NO: 3343
  Description of Artificial Sequence: Synthetic casein; 5' sequence + inner sequence + 3' sequence

SEQ ID NO: 51150 - DNA, 76 bp, Artificial Sequence; identical to SEQ ID NO: 47951
  Description of Artificial Sequence: Synthetic casein; 5' sequence + inner sequence + 3' sequence

SEQ ID NO: 51151 - DNA, 76 bp, Artificial Sequence; identical to SEQ ID NO: 23151
  Description of Artificial Sequence: Synthetic casein; 5' sequence + inner sequence + 3' sequence

SEQ ID NO: 51152 - DNA, 76 bp, Artificial Sequence; identical to SEQ ID NO: 31497
  Description of Artificial Sequence: Synthetic casein; 5' sequence + inner sequence + 3' sequence

SEQ ID NO: 51153 - DNA, 76 bp, Artificial Sequence; identical to SEQ ID NO: 31233
  Description of Artificial Sequence: Synthetic casein; 5' sequence + inner sequence + 3' sequence

SEQ ID NO: 51154 - DNA, 76 bp, Artificial Sequence; identical to SEQ ID NO: 3194
  Description of Artificial Sequence: Synthetic casein; 5' sequence + inner sequence + 3' sequence

SEQ ID NO: 51155 - DNA, 76 bp, Artificial Sequence
  Description of Artificial Sequence: Synthetic casein; 5' sequence + inner sequence + 3' sequence
tagggaagagaaggacatatgatgacgtgacgtgacggatggtgacgtacgcattgactagtacatgaccacttga

SEQ ID NO: 51156 - DNA, 76 bp, Artificial Sequence; identical to SEQ ID NO: 31400
  Description of Artificial Sequence: Synthetic casein; 5' sequence + inner sequence + 3' sequence

SEQ ID NO: 51157 - DNA, 76 bp, Artificial Sequence; identical to SEQ ID NO: 47116
  Description of Artificial Sequence: Synthetic casein; 5' sequence + inner sequence + 3' sequence

SEQ ID NO: 51158 - DNA, 76 bp, Artificial Sequence; identical to SEQ ID NO: 31335
  Description of Artificial Sequence: Synthetic casein; 5' sequence + inner sequence + 3' sequence

SEQ ID NO: 51159 - DNA, 76 bp, Artificial Sequence; identical to SEQ ID NO: 3303
  Description of Artificial Sequence: Synthetic casein; 5' sequence + inner sequence + 3' sequence

SEQ ID NO: 51160 - DNA, 76 bp, Artificial Sequence; identical to SEQ ID NO: 3073
  Description of Artificial Sequence: Synthetic casein; 5' sequence + inner sequence + 3' sequence

SEQ ID NO: 51161 - DNA, 76 bp, Artificial Sequence; identical to SEQ ID NO: 47678
  Description of Artificial Sequence: Synthetic casein; 5' sequence + inner sequence + 3' sequence

SEQ ID NO: 51162 - DNA, 76 bp, Artificial Sequence; identical to SEQ ID NO: 31869
  Description of Artificial Sequence: Synthetic casein; 5' sequence + inner sequence + 3' sequence

SEQ ID NO: 51163 - DNA, 76 bp, Artificial Sequence; identical to SEQ ID NO: 3272
  Description of Artificial Sequence: Synthetic casein; 5' sequence + inner sequence + 3' sequence

SEQ ID NO: 51164 - DNA, 76 bp, Artificial Sequence; identical to SEQ ID NO: 31471
  Description of Artificial Sequence: Synthetic casein; 5' sequence + inner sequence + 3' sequence

SEQ ID NO: 51165 - DNA, 76 bp, Artificial Sequence; identical to SEQ ID NO: 47127
  Description of Artificial Sequence: Synthetic casein; 5' sequence + inner sequence + 3' sequence

SEQ ID NO: 51166 - DNA, 76 bp, Artificial Sequence; identical to SEQ ID NO: 31720
  Description of Artificial Sequence: Synthetic casein; 5' sequence + inner sequence + 3' sequence

SEQ ID NO: 51167 - DNA, 76 bp, Artificial Sequence; identical to SEQ ID NO: 7707
  Description of Artificial Sequence: Synthetic casein; 5' sequence + inner sequence + 3' sequence

SEQ ID NO: 51168 - DNA, 76 bp, Artificial Sequence; identical to SEQ ID NO: 7521
  Description of Artificial Sequence: Synthetic casein; 5' sequence + inner sequence + 3' sequence

SEQ ID NO: 51169 - DNA, 76 bp, Artificial Sequence; identical to SEQ ID NO: 7336
  Description of Artificial Sequence: Synthetic casein; 5' sequence + inner sequence + 3' sequence

SEQ ID NO: 51170 - DNA, 76 bp, Artificial Sequence; identical to SEQ ID NO: 31682
  Description of Artificial Sequence: Synthetic casein; 5' sequence + inner sequence + 3' sequence

SEQ ID NO: 51171 - DNA, 76 bp, Artificial Sequence; identical to SEQ ID NO: 3161
  Description of Artificial Sequence: Synthetic casein; 5' sequence + inner sequence + 3' sequence

SEQ ID NO: 51172 - DNA, 76 bp, Artificial Sequence; identical to SEQ ID NO: 3457
  Description of Artificial Sequence: Synthetic casein; 5' sequence + inner sequence + 3' sequence

SEQ ID NO: 51173 - DNA, 76 bp, Artificial Sequence; identical to SEQ ID NO: 23869
  Description of Artificial Sequence: Synthetic casein; 5' sequence + inner sequence + 3' sequence

SEQ ID NO: 51174 - DNA, 76 bp, Artificial Sequence; identical to SEQ ID NO: 31760
  Description of Artificial Sequence: Synthetic casein; 5' sequence + inner sequence + 3' sequence

SEQ ID NO: 51175 - DNA, 76 bp, Artificial Sequence; identical to SEQ ID NO: 31971
  Description of Artificial Sequence: Synthetic casein; 5' sequence + inner sequence + 3' sequence

SEQ ID NO: 51176 - DNA, 76 bp, Artificial Sequence; identical to SEQ ID NO: 47140
  Description of Artificial Sequence: Synthetic casein; 5' sequence + inner sequence + 3' sequence

SEQ ID NO: 51177 - DNA, 76 bp, Artificial Sequence; identical to SEQ ID NO: 3022
  Description of Artificial Sequence: Synthetic casein; 5' sequence + inner sequence + 3' sequence

SEQ ID NO: 51178 - DNA, 76 bp, Artificial Sequence; identical to SEQ ID NO: 31995
  Description of Artificial Sequence: Synthetic casein; 5' sequence + inner sequence + 3' sequence

SEQ ID NO: 51179 - DNA, 77 bp, Artificial Sequence; identical to SEQ ID NO: 47761
  Description of Artificial Sequence: Synthetic casein; 5' sequence + inner sequence + 3' sequence

SEQ ID NO: 51180 - DNA, 76 bp, Artificial Sequence; identical to SEQ ID NO: 3828
  Description of Artificial Sequence: Synthetic casein; 5' sequence + inner sequence + 3' sequence

SEQ ID NO: 51181 - DNA, 76 bp, Artificial Sequence; identical to SEQ ID NO: 23551
  Description of Artificial Sequence: Synthetic casein; 5' sequence + inner sequence + 3' sequence

SEQ ID NO: 51182 - DNA, 76 bp, Artificial Sequence; identical to SEQ ID NO: 31839
  Description of Artificial Sequence: Synthetic casein; 5' sequence + inner sequence + 3' sequence

SEQ ID NO: 51183 - DNA, 76 bp, Artificial Sequence; identical to SEQ ID NO: 3617
  Description of Artificial Sequence: Synthetic casein; 5' sequence + inner sequence + 3' sequence

SEQ ID NO: 51184 - DNA, 76 bp, Artificial Sequence; identical to SEQ ID NO: 47318
  Description of Artificial Sequence: Synthetic casein; 5' sequence + inner sequence + 3' sequence

SEQ ID NO: 51185 - DNA, 76 bp, Artificial Sequence; identical to SEQ ID NO: 23504
  Description of Artificial Sequence: Synthetic casein; 5' sequence + inner sequence + 3' sequence

SEQ ID NO: 51186 - DNA, 76 bp, Artificial Sequence; identical to SEQ ID NO: 3267
  Description of Artificial Sequence: Synthetic casein; 5' sequence + inner sequence + 3' sequence

SEQ ID NO: 51187 - DNA, 76 bp, Artificial Sequence; identical to SEQ ID NO: 3727
  Description of Artificial Sequence: Synthetic casein; 5' sequence + inner sequence + 3' sequence

SEQ ID NO: 51188 - DNA, 76 bp, Artificial Sequence; identical to SEQ ID NO: 47112
  Description of Artificial Sequence: Synthetic casein; 5' sequence + inner sequence + 3' sequence

SEQ ID NO: 51189 - DNA, 76 bp, Artificial Sequence; identical to SEQ ID NO: 47227
  Description of Artificial Sequence: Synthetic casein; 5' sequence + inner sequence + 3' sequence

SEQ ID NO: 51190 - DNA, 76 bp, Artificial Sequence; identical to SEQ ID NO: 47542
  Description of Artificial Sequence: Synthetic casein; 5' sequence + inner sequence + 3' sequence

SEQ ID NO: 51191 - DNA, 71 bp, Artificial Sequence; identical to SEQ ID NO: 19927
  Description of Artificial Sequence: Synthetic casein; 5' sequence + inner sequence + 3' sequence

SEQ ID NO: 51192 - DNA, 76 bp, Artificial Sequence; identical to SEQ ID NO: 47297
  Description of Artificial Sequence: Synthetic casein; 5' sequence + inner sequence + 3' sequence

SEQ ID NO: 51193 - DNA, 76 bp, Artificial Sequence; identical to SEQ ID NO: 31557
  Description of Artificial Sequence: Synthetic casein; 5' sequence + inner sequence + 3' sequence

SEQ ID NO: 51194 - DNA, 76 bp, Artificial Sequence; identical to SEQ ID NO: 19531
  Description of Artificial Sequence: Synthetic casein; 5' sequence + inner sequence + 3' sequence

SEQ ID NO: 51195 - DNA, 76 bp, Artificial Sequence; identical to SEQ ID NO: 3077
  Description of Artificial Sequence: Synthetic casein; 5' sequence + inner sequence + 3' sequence

SEQ ID NO: 51196 - DNA, 76 bp, Artificial Sequence; identical to SEQ ID NO: 31874
  Description of Artificial Sequence: Synthetic casein; 5' sequence + inner sequence + 3' sequence

SEQ ID NO: 51197 - DNA, 76 bp, Artificial Sequence; identical to SEQ ID NO: 7571
  Description of Artificial Sequence: Synthetic casein; 5' sequence + inner sequence + 3' sequence

SEQ ID NO: 51198 - DNA, 76 bp, Artificial Sequence
  Description of Artificial Sequence: Synthetic casein; 5' sequence + inner sequence + 3' sequence
tagggaagagaaggacatatgatcgtacggaacggcacgtcctgtcctacgcattgactagtacatgaccacttga

SEQ ID NO: 51199 - DNA, 76 bp, Artificial Sequence; identical to SEQ ID NO: 23984
  Description of Artificial Sequence: Synthetic casein; 5' sequence + inner sequence + 3' sequence

SEQ ID NO: 51200 - DNA, 76 bp, Artificial Sequence; identical to SEQ ID NO: 3016
  Description of Artificial Sequence: Synthetic casein; 5' sequence + inner sequence + 3' sequence

SEQ ID NO: 51201 - DNA, 76 bp, Artificial Sequence; identical to SEQ ID NO: 43829
  Description of Artificial Sequence: Synthetic casein; 5' sequence + inner sequence + 3' sequence

SEQ ID NO: 51202 - DNA, 76 bp, Artificial Sequence; identical to SEQ ID NO: 19399
  Description of Artificial Sequence: Synthetic casein; 5' sequence + inner sequence + 3' sequence

SEQ ID NO: 51203 - DNA, 76 bp, Artificial Sequence; identical to SEQ ID NO: 47777
  Description of Artificial Sequence: Synthetic casein; 5' sequence + inner sequence + 3' sequence

SEQ ID NO: 51204 - DNA, 76 bp, Artificial Sequence; identical to SEQ ID NO: 47159
  Description of Artificial Sequence: Synthetic casein; 5' sequence + inner sequence + 3' sequence

SEQ ID NO: 51205 - DNA, 76 bp, Artificial Sequence; identical to SEQ ID NO: 23518
  Description of Artificial Sequence: Synthetic casein; 5' sequence + inner sequence + 3' sequence

SEQ ID NO: 51206 - DNA, 76 bp, Artificial Sequence; identical to SEQ ID NO: 3632
  Description of Artificial Sequence: Synthetic casein; 5' sequence + inner sequence + 3' sequence

SEQ ID NO: 51207 - DNA, 75 bp, Artificial Sequence; identical to SEQ ID NO: 31565
  Description of Artificial Sequence: Synthetic casein; 5' sequence + inner sequence + 3' sequence

SEQ ID NO: 51208 - DNA, 76 bp, Artificial Sequence; identical to SEQ ID NO: 3454
  Description of Artificial Sequence: Synthetic casein; 5' sequence + inner sequence + 3' sequence

SEQ ID NO: 51209 - DNA, 76 bp, Artificial Sequence; identical to SEQ ID NO: 47166
  Description of Artificial Sequence: Synthetic casein; 5' sequence + inner sequence + 3' sequence

SEQ ID NO: 51210 - DNA, 76 bp, Artificial Sequence; identical to SEQ ID NO: 3051
  Description of Artificial Sequence: Synthetic casein; 5' sequence + inner sequence + 3' sequence

SEQ ID NO: 51211 - DNA, 76 bp, Artificial Sequence; identical to SEQ ID NO: 3228
  Description of Artificial Sequence: Synthetic casein; 5' sequence + inner sequence + 3' sequence

SEQ ID NO: 51212 - DNA, 76 bp, Artificial Sequence; identical to SEQ ID NO: 7489
  Description of Artificial Sequence: Synthetic casein; 5' sequence + inner sequence + 3' sequence

SEQ ID NO: 51213 - DNA, 76 bp, Artificial Sequence; identical to SEQ ID NO: 3232
  Description of Artificial Sequence: Synthetic casein; 5' sequence + inner sequence + 3' sequence

SEQ ID NO: 51214 - DNA, 76 bp, Artificial Sequence; identical to SEQ ID NO: 47493
  Description of Artificial Sequence: Synthetic casein; 5' sequence + inner sequence + 3' sequence

SEQ ID NO: 51215 - DNA, 76 bp, Artificial Sequence; identical to SEQ ID NO: 47191
  Description of Artificial Sequence: Synthetic casein; 5' sequence + inner sequence + 3' sequence

SEQ ID NO: 51216 - DNA, 76 bp, Artificial Sequence; identical to SEQ ID NO: 31582
  Description of Artificial Sequence: Synthetic casein; 5' sequence + inner sequence + 3' sequence

SEQ ID NO: 51217 - DNA, 76 bp, Artificial Sequence; identical to SEQ ID NO: 3352
  Description of Artificial Sequence: Synthetic casein; 5' sequence + inner sequence + 3' sequence

SEQ ID NO: 51218 - DNA, 76 bp, Artificial Sequence; identical to SEQ ID NO: 3619
  Description of Artificial Sequence: Synthetic casein; 5' sequence + inner sequence + 3' sequence

SEQ ID NO: 51219 - DNA, 76 bp, Artificial Sequence; identical to SEQ ID NO: 31735
  Description of Artificial Sequence: Synthetic casein; 5' sequence + inner sequence + 3' sequence

SEQ ID NO: 51220 - DNA, 76 bp, Artificial Sequence; identical to SEQ ID NO: 23737
  Description of Artificial Sequence: Synthetic casein; 5' sequence + inner sequence + 3' sequence

SEQ ID NO: 51221 - DNA, 76 bp, Artificial Sequence
  Description of Artificial Sequence: Synthetic casein; 5' sequence + inner sequence + 3' sequence
tagggaagagaaggacatatgatgtcacgtcgtcacgcagcatgtacggcacattgactagtacatgaccacttga

SEQ ID NO: 51222 - DNA, 76 bp, Artificial Sequence; identical to SEQ ID NO: 3151
  Description of Artificial Sequence: Synthetic casein; 5' sequence + inner sequence + 3' sequence

SEQ ID NO: 51223 - DNA, 76 bp, Artificial Sequence; identical to SEQ ID NO: 7940
  Description of Artificial Sequence: Synthetic casein; 5' sequence + inner sequence + 3' sequence

SEQ ID NO: 51224 - DNA, 76 bp, Artificial Sequence; identical to SEQ ID NO: 23889
  Description of Artificial Sequence: Synthetic casein; 5' sequence + inner sequence + 3' sequence

SEQ ID NO: 51225 - DNA, 76 bp, Artificial Sequence; identical to SEQ ID NO: 31432
  Description of Artificial Sequence: Synthetic casein; 5' sequence + inner sequence + 3' sequence

SEQ ID NO: 51226 - DNA, 76 bp, Artificial Sequence; identical to SEQ ID NO: 3320
  Description of Artificial Sequence: Synthetic casein; 5' sequence + inner sequence + 3' sequence

SEQ ID NO: 51227 - DNA, 76 bp, Artificial Sequence; identical to SEQ ID NO: 3891
  Description of Artificial Sequence: Synthetic casein; 5' sequence + inner sequence + 3' sequence

SEQ ID NO: 51228 - DNA, 76 bp, Artificial Sequence; identical to SEQ ID NO: 47345
  Description of Artificial Sequence: Synthetic casein; 5' sequence + inner sequence + 3' sequence

SEQ ID NO: 51229 - DNA, 76 bp, Artificial Sequence; identical to SEQ ID NO: 3149
  Description of Artificial Sequence: Synthetic casein; 5' sequence + inner sequence + 3' sequence

SEQ ID NO: 51230 - DNA, 76 bp, Artificial Sequence; identical to SEQ ID NO: 23519
  Description of Artificial Sequence: Synthetic casein; 5' sequence + inner sequence + 3' sequence

SEQ ID NO: 51231 - DNA, 76 bp, Artificial Sequence; identical to SEQ ID NO: 3227
  Description of Artificial Sequence: Synthetic casein; 5' sequence + inner sequence + 3' sequence

SEQ ID NO: 51232 - DNA, 76 bp, Artificial Sequence; identical to SEQ ID NO: 47461
  Description of Artificial Sequence: Synthetic casein; 5' sequence + inner sequence + 3' sequence

SEQ ID NO: 51233 - DNA, 76 bp, Artificial Sequence; identical to SEQ ID NO: 3192
  Description of Artificial Sequence: Synthetic casein; 5' sequence + inner sequence + 3' sequence

SEQ ID NO: 51234 - DNA, 76 bp, Artificial Sequence; identical to SEQ ID NO: 47182
  Description of Artificial Sequence: Synthetic casein; 5' sequence + inner sequence + 3' sequence

SEQ ID NO: 51235 - DNA, 76 bp, Artificial Sequence; identical to SEQ ID NO: 23324
  Description of Artificial Sequence: Synthetic casein; 5' sequence + inner sequence + 3' sequence

SEQ ID NO: 51236 - DNA, 76 bp, Artificial Sequence; identical to SEQ ID NO: 3131
  Description of Artificial Sequence: Synthetic casein; 5' sequence + inner sequence + 3' sequence

SEQ ID NO: 51237 - DNA, 76 bp, Artificial Sequence; identical to SEQ ID NO: 3321
  Description of Artificial Sequence: Synthetic casein; 5' sequence + inner sequence + 3' sequence

SEQ ID NO: 51238 - DNA, 75 bp, Artificial Sequence; identical to SEQ ID NO: 31660
  Description of Artificial Sequence: Synthetic casein; 5' sequence + inner sequence + 3' sequence

SEQ ID NO: 51239 - DNA, 76 bp, Artificial Sequence; identical to SEQ ID NO: 31315
  Description of Artificial Sequence: Synthetic casein; 5' sequence + inner sequence + 3' sequence

SEQ ID NO: 51240 - DNA, 76 bp, Artificial Sequence; identical to SEQ ID NO: 11910
  Description of Artificial Sequence: Synthetic casein; 5' sequence + inner sequence + 3' sequence

SEQ ID NO: 51241 - DNA, 76 bp, Artificial Sequence; identical to SEQ ID NO: 3190
  Description of Artificial Sequence: Synthetic casein; 5' sequence + inner sequence + 3' sequence

SEQ ID NO: 51242 - DNA, 76 bp, Artificial Sequence; identical to SEQ ID NO: 3207
  Description of Artificial Sequence: Synthetic casein; 5' sequence + inner sequence + 3' sequence

SEQ ID NO: 51243 - DNA, 76 bp, Artificial Sequence; identical to SEQ ID NO: 47722
  Description of Artificial Sequence: Synthetic casein; 5' sequence + inner sequence + 3' sequence

SEQ ID NO: 51244 - DNA, 76 bp, Artificial Sequence; identical to SEQ ID NO: 19978
  Description of Artificial Sequence: Synthetic casein; 5' sequence + inner sequence + 3' sequence

SEQ ID NO: 51245 - DNA, 76 bp, Artificial Sequence; identical to SEQ ID NO: 31173
  Description of Artificial Sequence: Synthetic casein; 5' sequence + inner sequence + 3' sequence

SEQ ID NO: 51246 - DNA, 76 bp, Artificial Sequence
  Description of Artificial Sequence: Synthetic casein; 5' sequence + inner sequence + 3' sequence
tagggaagagaaggacatatgatgatgcgtcacgtaaccgtccttgcgtcacgttgactagtacatgaccacttga

SEQ ID NO: 51247 - DNA, 76 bp, Artificial Sequence
  Description of Artificial Sequence: Synthetic casein; 5' sequence + inner sequence + 3' sequence
tagggaagagaaggacatatgatgcgtcacgatgcgacggtatggactgcgtgttgactagtacatgaccacttga

SEQ ID NO: 51248 - DNA, 76 bp, Artificial Sequence; identical to SEQ ID NO: 23302
  Description of Artificial Sequence: Synthetic casein; 5' sequence + inner sequence + 3' sequence

SEQ ID NO: 51249 - DNA, 76 bp, Artificial Sequence; identical to SEQ ID NO: 3644
  Description of Artificial Sequence: Synthetic casein; 5' sequence + inner sequence + 3' sequence

SEQ ID NO: 51250 - DNA, 76 bp, Artificial Sequence
  Description of Artificial Sequence: Synthetic casein; 5' sequence + inner sequence + 3' sequence
tagggaagagaaggacatatgatgcacgatacgtacctgctatgtacgtcacgttgactagtacatgaccacttga

SEQ ID NO: 51251 - DNA, 76 bp, Artificial Sequence; identical to SEQ ID NO: 19861
  Description of Artificial Sequence: Synthetic casein; 5' sequence + inner sequence + 3' sequence

SEQ ID NO: 51252 - DNA, 76 bp, Artificial Sequence; identical to SEQ ID NO: 31688
  Description of Artificial Sequence: Synthetic casein; 5' sequence + inner sequence + 3' sequence

SEQ ID NO: 51253 - DNA, 76 bp, Artificial Sequence; identical to SEQ ID NO: 3728
  Description of Artificial Sequence: Synthetic casein; 5' sequence + inner sequence + 3' sequence

SEQ ID NO: 51254 - DNA, 76 bp, Artificial Sequence; identical to SEQ ID NO: 31555
  Description of Artificial Sequence: Synthetic casein; 5' sequence + inner sequence + 3' sequence

SEQ ID NO: 51255 - DNA, 76 bp, Artificial Sequence; identical to SEQ ID NO: 3274
  Description of Artificial Sequence: Synthetic casein; 5' sequence + inner sequence + 3' sequence

SEQ ID NO: 51256 - DNA, 76 bp, Artificial Sequence; identical to SEQ ID NO: 31960
  Description of Artificial Sequence: Synthetic casein; 5' sequence + inner sequence + 3' sequence

SEQ ID NO: 51257 - DNA, 76 bp, Artificial Sequence; identical to SEQ ID NO: 47582
  Description of Artificial Sequence: Synthetic casein; 5' sequence + inner sequence + 3' sequence

SEQ ID NO: 51258 - DNA, 76 bp, Artificial Sequence; identical to SEQ ID NO: 19513
  Description of Artificial Sequence: Synthetic casein; 5' sequence + inner sequence + 3' sequence

SEQ ID NO: 51259 - DNA, 76 bp, Artificial Sequence; identical to SEQ ID NO: 3372
  Description of Artificial Sequence: Synthetic casein; 5' sequence + inner sequence + 3' sequence

SEQ ID NO: 51260 - DNA, 76 bp, Artificial Sequence; identical to SEQ ID NO: 3256
  Description of Artificial Sequence: Synthetic casein; 5' sequence + inner sequence + 3' sequence

SEQ ID NO: 51261 - DNA, 76 bp, Artificial Sequence; identical to SEQ ID NO: 3204
  Description of Artificial Sequence: Synthetic casein; 5' sequence + inner sequence + 3' sequence

SEQ ID NO: 51262 - DNA, 76 bp, Artificial Sequence; identical to SEQ ID NO: 47237
  Description of Artificial Sequence: Synthetic casein; 5' sequence + inner sequence + 3' sequence

SEQ ID NO: 51263 - DNA, 76 bp, Artificial Sequence; identical to SEQ ID NO: 31978
  Description of Artificial Sequence: Synthetic casein; 5' sequence + inner sequence + 3' sequence

SEQ ID NO: 51264 - DNA, 76 bp, Artificial Sequence; identical to SEQ ID NO: 3249
  Description of Artificial Sequence: Synthetic casein; 5' sequence + inner sequence + 3' sequence

SEQ ID NO: 51265 - DNA, 76 bp, Artificial Sequence; identical to SEQ ID NO: 31924
  Description of Artificial Sequence: Synthetic casein; 5' sequence + inner sequence + 3' sequence

SEQ ID NO: 51266 - DNA, 76 bp, Artificial Sequence; identical to SEQ ID NO: 47348
  Description of Artificial Sequence: Synthetic casein; 5' sequence + inner sequence + 3' sequence

SEQ ID NO: 51267 - DNA, 76 bp, Artificial Sequence; identical to SEQ ID NO: 31158
  Description of Artificial Sequence: Synthetic casein; 5' sequence + inner sequence + 3' sequence

SEQ ID NO: 51268 - DNA, 76 bp, Artificial Sequence; identical to SEQ ID NO: 3115
  Description of Artificial Sequence: Synthetic casein; 5' sequence + inner sequence + 3' sequence

SEQ ID NO: 51269 - DNA, 76 bp, Artificial Sequence; identical to SEQ ID NO: 3397
  Description of Artificial Sequence: Synthetic casein; 5' sequence + inner sequence + 3' sequence

SEQ ID NO: 51270 - DNA, 76 bp, Artificial Sequence; identical to SEQ ID NO: 23560
  Description of Artificial Sequence: Synthetic casein; 5' sequence + inner sequence + 3' sequence

SEQ ID NO: 51271 - DNA, 72 bp, Artificial Sequence; identical to SEQ ID NO: 3893
  Description of Artificial Sequence: Synthetic casein; 5' sequence + inner sequence + 3' sequence

SEQ ID NO: 51272 - DNA, 76 bp, Artificial Sequence; identical to SEQ ID NO: 31808
  Description of Artificial Sequence: Synthetic casein; 5' sequence + inner sequence + 3' sequence

SEQ ID NO: 51273 - DNA, 76 bp, Artificial Sequence; identical to SEQ ID NO: 47698
  Description of Artificial Sequence: Synthetic casein; 5' sequence + inner sequence + 3' sequence

SEQ ID NO: 51274 - DNA, 74 bp, Artificial Sequence; identical to SEQ ID NO: 7786
  Description of Artificial Sequence: Synthetic casein; 5' sequence + inner sequence + 3' sequence

SEQ ID NO: 51275 - DNA, 76 bp, Artificial Sequence; identical to SEQ ID NO: 31693
  Description of Artificial Sequence: Synthetic casein; 5' sequence + inner sequence + 3' sequence

SEQ ID NO: 51276 - DNA, 76 bp, Artificial Sequence; identical to SEQ ID NO: 31996
  Description of Artificial Sequence: Synthetic casein; 5' sequence + inner sequence + 3' sequence

SEQ ID NO: 51277 - DNA, 76 bp, Artificial Sequence; identical to SEQ ID NO: 31416
  Description of Artificial Sequence: Synthetic casein; 5' sequence + inner sequence + 3' sequence

SEQ ID NO: 51278 - DNA, 76 bp, Artificial Sequence; identical to SEQ ID NO: 23836
  Description of Artificial Sequence: Synthetic casein; 5' sequence + inner sequence + 3' sequence

SEQ ID NO: 51279 - DNA, 76 bp, Artificial Sequence; identical to SEQ ID NO: 3031
  Description of Artificial Sequence: Synthetic casein; 5' sequence + inner sequence + 3' sequence

SEQ ID NO: 51280 - DNA, 75 bp, Artificial Sequence; identical to SEQ ID NO: 47435
  Description of Artificial Sequence: Synthetic casein; 5' sequence + inner sequence + 3' sequence

SEQ ID NO: 51281 - DNA, 76 bp, Artificial Sequence; identical to SEQ ID NO: 19819
  Description of Artificial Sequence: Synthetic casein; 5' sequence + inner sequence + 3' sequence

SEQ ID NO: 51282 - DNA, 76 bp, Artificial Sequence; identical to SEQ ID NO: 31959
  Description of Artificial Sequence: Synthetic casein; 5' sequence + inner sequence + 3' sequence

SEQ ID NO: 51283 - DNA, 76 bp, Artificial Sequence; identical to SEQ ID NO: 3177
  Description of Artificial Sequence: Synthetic casein; 5' sequence + inner sequence + 3' sequence

SEQ ID NO: 51284 - DNA, 76 bp, Artificial Sequence; identical to SEQ ID NO: 31934
  Description of Artificial Sequence: Synthetic casein; 5' sequence + inner sequence + 3' sequence

SEQ ID NO: 51285 - DNA, 76 bp, Artificial Sequence; identical to SEQ ID NO: 47479
  Description of Artificial Sequence: Synthetic casein; 5' sequence + inner sequence + 3' sequence

SEQ ID NO: 51286 - DNA, 76 bp, Artificial Sequence; identical to SEQ ID NO: 3776
  Description of Artificial Sequence: Synthetic casein; 5' sequence + inner sequence + 3' sequence

SEQ ID NO: 51287 - DNA, 76 bp, Artificial Sequence; identical to SEQ ID NO: 31793
  Description of Artificial Sequence: Synthetic casein; 5' sequence + inner sequence + 3' sequence

SEQ ID NO: 51288 - DNA, 76 bp, Artificial Sequence; identical to SEQ ID NO: 47490
  Description of Artificial Sequence: Synthetic casein; 5' sequence + inner sequence + 3' sequence

SEQ ID NO: 51289 - DNA, 76 bp, Artificial Sequence; identical to SEQ ID NO: 31754
  Description of Artificial Sequence: Synthetic casein; 5' sequence + inner sequence + 3' sequence

SEQ ID NO: 51290 - DNA, 76 bp, Artificial Sequence; identical to SEQ ID NO: 3884
  Description of Artificial Sequence: Synthetic casein; 5' sequence + inner sequence + 3' sequence

SEQ ID NO: 51291 - DNA, 76 bp, Artificial Sequence; identical to SEQ ID NO: 3114
  Description of Artificial Sequence: Synthetic casein; 5' sequence + inner sequence + 3' sequence

SEQ ID NO: 51292 - DNA, 76 bp, Artificial Sequence
  Description of Artificial Sequence: Synthetic casein; 5' sequence + inner sequence + 3' sequence
tagggaagagaaggacatatgatgcgtcacgccacatgtacgtatgcgtcacgttgactagtacatgaccacttga

SEQ ID NO: 51293 - DNA, 76 bp, Artificial Sequence; identical to SEQ ID NO: 47819
  Description of Artificial Sequence: Synthetic casein; 5' sequence + inner sequence + 3' sequence

SEQ ID NO: 51294 - DNA, 76 bp, Artificial Sequence; identical to SEQ ID NO: 3909
  Description of Artificial Sequence: Synthetic casein; 5' sequence + inner sequence + 3' sequence

SEQ ID NO: 51295 - DNA, 76 bp, Artificial Sequence; identical to SEQ ID NO: 3591
  Description of Artificial Sequence: Synthetic casein; 5' sequence + inner sequence + 3' sequence

SEQ ID NO: 51296 - DNA, 76 bp, Artificial Sequence; identical to SEQ ID NO: 3955
  Description of Artificial Sequence: Synthetic casein; 5' sequence + inner sequence + 3' sequence

SEQ ID NO: 51297 - DNA, 76 bp, Artificial Sequence; identical to SEQ ID NO: 47344
  Description of Artificial Sequence: Synthetic casein; 5' sequence + inner sequence + 3' sequence

SEQ ID NO: 51298 - DNA, 76 bp, Artificial Sequence; identical to SEQ ID NO: 19703
  Description of Artificial Sequence: Synthetic casein; 5' sequence + inner sequence + 3' sequence

SEQ ID NO: 51299 - DNA, 76 bp, Artificial Sequence; identical to SEQ ID NO: 47744
  Description of Artificial Sequence: Synthetic casein; 5' sequence + inner sequence + 3' sequence

SEQ ID NO: 51300 - DNA, 76 bp, Artificial Sequence; identical to SEQ ID NO: 47439
  Description of Artificial Sequence: Synthetic casein; 5' sequence + inner sequence + 3' sequence

SEQ ID NO: 51301 - DNA, 76 bp, Artificial Sequence; identical to SEQ ID NO: 7743
  Description of Artificial Sequence: Synthetic casein; 5' sequence + inner sequence + 3' sequence

SEQ ID NO: 51302 - DNA, 76 bp, Artificial Sequence; identical to SEQ ID NO: 3358
  Description of Artificial Sequence: Synthetic casein; 5' sequence + inner sequence + 3' sequence

SEQ ID NO: 51303 - DNA, 76 bp, Artificial Sequence; identical to SEQ ID NO: 31603
  Description of Artificial Sequence: Synthetic casein; 5' sequence + inner sequence + 3' sequence

SEQ ID NO: 51304 - DNA, 76 bp, Artificial Sequence; identical to SEQ ID NO: 3901
  Description of Artificial Sequence: Synthetic casein; 5' sequence + inner sequence + 3' sequence

SEQ ID NO: 51305 - DNA, 76 bp, Artificial Sequence; identical to SEQ ID NO: 7620
  Description of Artificial Sequence: Synthetic casein; 5' sequence + inner sequence + 3' sequence

SEQ ID NO: 51306 - DNA, 72 bp, Artificial Sequence
  Description of Artificial Sequence: Synthetic casein; 5' sequence + inner sequence + 3' sequence
tagggaagagaaggacatatgatggacgcaacgtaccgccgtggccatgttgactagtacatgaccacttga

SEQ ID NO: 51307 - DNA, 76 bp, Artificial Sequence; identical to SEQ ID NO: 3144
  Description of Artificial Sequence: Synthetic casein; 5' sequence + inner sequence + 3' sequence

SEQ ID NO: 51308 - DNA, 76 bp, Artificial Sequence; identical to SEQ ID NO: 47614
  Description of Artificial Sequence: Synthetic casein; 5' sequence + inner sequence + 3' sequence

SEQ ID NO: 51309 - DNA, 76 bp, Artificial Sequence; identical to SEQ ID NO: 3351
  Description of Artificial Sequence: Synthetic casein; 5' sequence + inner sequence + 3' sequence

SEQ ID NO: 51310 - DNA, 76 bp, Artificial Sequence; identical to SEQ ID NO: 3137
  Description of Artificial Sequence: Synthetic casein; 5' sequence + inner sequence + 3' sequence

SEQ ID NO: 51311 - DNA, 76 bp, Artificial Sequence; identical to SEQ ID NO: 3823
  Description of Artificial Sequence: Synthetic casein; 5' sequence + inner sequence + 3' sequence

SEQ ID NO: 51312 - DNA, 76 bp, Artificial Sequence; identical to SEQ ID NO: 31744
  Description of Artificial Sequence: Synthetic casein; 5' sequence + inner sequence + 3' sequence

SEQ ID NO: 51313 - DNA, 76 bp, Artificial Sequence; identical to SEQ ID NO: 27984
  Description of Artificial Sequence: Synthetic casein; 5' sequence + inner sequence + 3' sequence

SEQ ID NO: 51314 - DNA, 76 bp, Artificial Sequence; identical to SEQ ID NO: 3615
  Description of Artificial Sequence: Synthetic casein; 5' sequence + inner sequence + 3' sequence

SEQ ID NO: 51315 - DNA, 76 bp, Artificial Sequence; identical to SEQ ID NO: 47251
  Description of Artificial Sequence: Synthetic casein; 5' sequence + inner sequence + 3' sequence

SEQ ID NO: 51316 - DNA, 76 bp, Artificial Sequence; identical to SEQ ID NO: 31516
  Description of Artificial Sequence: Synthetic casein; 5' sequence + inner sequence + 3' sequence

SEQ ID NO: 51317 - DNA, 76 bp, Artificial Sequence; identical to SEQ ID NO: 23478
  Description of Artificial Sequence: Synthetic casein; 5' sequence + inner sequence + 3' sequence

SEQ ID NO: 51318 - DNA, 76 bp, Artificial Sequence; identical to SEQ ID NO: 31591
  Description of Artificial Sequence: Synthetic casein; 5' sequence + inner sequence + 3' sequence

SEQ ID NO: 51319 - DNA, 76 bp, Artificial Sequence; identical to SEQ ID NO: 23466
  Description of Artificial Sequence: Synthetic casein; 5' sequence + inner sequence + 3' sequence

SEQ ID NO: 51320 - DNA, 76 bp, Artificial Sequence; identical to SEQ ID NO: 3060
  Description of Artificial Sequence: Synthetic casein; 5' sequence + inner sequence + 3' sequence

SEQ ID NO: 51321 - DNA, 76 bp, Artificial Sequence; identical to SEQ ID NO: 3289
  Description of Artificial Sequence: Synthetic casein; 5' sequence + inner sequence + 3' sequence

SEQ ID NO: 51322 - DNA, 76 bp, Artificial Sequence
  Description of Artificial Sequence: Synthetic casein; 5' sequence + inner sequence + 3' sequence
tagggaagagaaggacatatgatcgttgcgcacgcacgtcatgtggatgcacgttgactagtacatgaccacttga

SEQ ID NO: 51323 - DNA, 76 bp, Artificial Sequence; identical to SEQ ID NO: 23769
  Description of Artificial Sequence: Synthetic casein; 5' sequence + inner sequence + 3' sequence

SEQ ID NO: 51324 - DNA, 76 bp, Artificial Sequence; identical to SEQ ID NO: 3038
  Description of Artificial Sequence: Synthetic casein; 5' sequence + inner sequence + 3' sequence

SEQ ID NO: 51325 - DNA, 76 bp, Artificial Sequence; identical to SEQ ID NO: 7938
  Description of Artificial Sequence: Synthetic casein; 5' sequence + inner sequence + 3' sequence

SEQ ID NO: 51326 - DNA, 76 bp, Artificial Sequence; identical to SEQ ID NO: 3225
  Description of Artificial Sequence: Synthetic casein; 5' sequence + inner sequence + 3' sequence

SEQ ID NO: 51327 - DNA, 76 bp, Artificial Sequence; identical to SEQ ID NO: 3244
  Description of Artificial Sequence: Synthetic casein; 5' sequence + inner sequence + 3' sequence

SEQ ID NO: 51328 - DNA, 76 bp, Artificial Sequence; identical to SEQ ID NO: 7960
  Description of Artificial Sequence: Synthetic casein; 5' sequence + inner sequence + 3' sequence

SEQ ID NO: 51329 - DNA, 76 bp, Artificial Sequence; identical to SEQ ID NO: 23811
  Description of Artificial Sequence: Synthetic casein; 5' sequence + inner sequence + 3' sequence

SEQ ID NO: 51330 - DNA, 76 bp, Artificial Sequence; identical to SEQ ID NO: 19948
  Description of Artificial Sequence: Synthetic casein; 5' sequence + inner sequence + 3' sequence

SEQ ID NO: 51331 - DNA, 76 bp, Artificial Sequence; identical to SEQ ID NO: 47472
  Description of Artificial Sequence: Synthetic casein; 5' sequence + inner sequence + 3' sequence

SEQ ID NO: 51332 - DNA, 76 bp, Artificial Sequence; identical to SEQ ID NO: 3367
  Description of Artificial Sequence: Synthetic casein; 5' sequence + inner sequence + 3' sequence

SEQ ID NO: 51333 - DNA, 76 bp, Artificial Sequence; identical to SEQ ID NO: 31114
  Description of Artificial Sequence: Synthetic casein; 5' sequence + inner sequence + 3' sequence

SEQ ID NO: 51334 - DNA, 76 bp, Artificial Sequence; identical to SEQ ID NO: 3141
  Description of Artificial Sequence: Synthetic casein; 5' sequence + inner sequence + 3' sequence

SEQ ID NO: 51335 - DNA, 76 bp, Artificial Sequence; identical to SEQ ID NO: 31747
  Description of Artificial Sequence: Synthetic casein; 5' sequence + inner sequence + 3' sequence

SEQ ID NO: 51336 - DNA, 76 bp, Artificial Sequence; identical to SEQ ID NO: 19585
  Description of Artificial Sequence: Synthetic casein; 5' sequence + inner sequence + 3' sequence

SEQ ID NO: 51337 - DNA, 76 bp, Artificial Sequence; identical to SEQ ID NO: 3706
  Description of Artificial Sequence: Synthetic casein; 5' sequence + inner sequence + 3' sequence

SEQ ID NO: 51338 - DNA, 76 bp, Artificial Sequence; identical to SEQ ID NO: 3780
  Description of Artificial Sequence: Synthetic casein; 5' sequence + inner sequence + 3' sequence

SEQ ID NO: 51339 - DNA, 76 bp, Artificial Sequence; identical to SEQ ID NO: 47293
  Description of Artificial Sequence: Synthetic casein; 5' sequence + inner sequence + 3' sequence

SEQ ID NO: 51340 - DNA, 76 bp, Artificial Sequence; identical to SEQ ID NO: 3117
  Description of Artificial Sequence: Synthetic casein; 5' sequence + inner sequence + 3' sequence

SEQ ID NO: 51341 - DNA, 76 bp, Artificial Sequence; identical to SEQ ID NO: 3344
  Description of Artificial Sequence: Synthetic casein; 5' sequence + inner sequence + 3' sequence

SEQ ID NO: 51342 - DNA, 76 bp, Artificial Sequence; identical to SEQ ID NO: 3860
  Description of Artificial Sequence: Synthetic casein; 5' sequence + inner sequence + 3' sequence

SEQ ID NO: 51343 - DNA, 76 bp, Artificial Sequence; identical to SEQ ID NO: 31389
  Description of Artificial Sequence: Synthetic casein; 5' sequence + inner sequence + 3' sequence

SEQ ID NO: 51344 - DNA, 76 bp, Artificial Sequence; identical to SEQ ID NO: 7638
  Description of Artificial Sequence: Synthetic casein; 5' sequence + inner sequence + 3' sequence

SEQ ID NO: 51345 - DNA, 76 bp, Artificial Sequence; identical to SEQ ID NO: 3290
  Description of Artificial Sequence: Synthetic casein; 5' sequence + inner sequence + 3' sequence

SEQ ID NO: 51346 - DNA, 76 bp, Artificial Sequence; identical to SEQ ID NO: 3074
  Description of Artificial Sequence: Synthetic casein; 5' sequence + inner sequence + 3' sequence

SEQ ID NO: 51347 - DNA, 76 bp, Artificial Sequence; identical to SEQ ID NO: 23613
  Description of Artificial Sequence: Synthetic casein; 5' sequence + inner sequence + 3' sequence

SEQ ID NO: 51348 - DNA, 76 bp, Artificial Sequence; identical to SEQ ID NO: 3877
  Description of Artificial Sequence: Synthetic casein; 5' sequence + inner sequence + 3' sequence

SEQ ID NO: 51349 - DNA, 76 bp, Artificial Sequence; identical to SEQ ID NO: 3246
  Description of Artificial Sequence: Synthetic casein; 5' sequence + inner sequence + 3' sequence

SEQ ID NO: 51350 - DNA, 76 bp, Artificial Sequence; identical to SEQ ID NO: 23730
  Description of Artificial Sequence: Synthetic casein; 5' sequence + inner sequence + 3' sequence

SEQ ID NO: 51351 - DNA, 76 bp, Artificial Sequence
  Description of Artificial Sequence: Synthetic casein; 5' sequence + inner sequence + 3' sequence
tagggaagagaaggacatatgatacgtgcgtacgcgtcgtgacgtactgcgtgttgactagtacatgaccacttga

SEQ ID NO: 51352 - DNA, 76 bp, Artificial Sequence; identical to SEQ ID NO: 3248
  Description of Artificial Sequence: Synthetic casein; 5' sequence + inner sequence + 3' sequence

SEQ ID NO: 51353 - DNA, 76 bp, Artificial Sequence; identical to SEQ ID NO: 31780
  Description of Artificial Sequence: Synthetic casein; 5' sequence + inner sequence + 3' sequence

SEQ ID NO: 51354 - DNA, 76 bp, Artificial Sequence; identical to SEQ ID NO: 19906
  Description of Artificial Sequence: Synthetic casein; 5' sequence + inner sequence + 3' sequence

SEQ ID NO: 51355 - DNA, 76 bp, Artificial Sequence; identical to SEQ ID NO: 31909
  Description of Artificial Sequence: Synthetic casein; 5' sequence + inner sequence + 3' sequence

SEQ ID NO: 51356 - DNA, 76 bp, Artificial Sequence; identical to SEQ ID NO: 47256
  Description of Artificial Sequence: Synthetic casein; 5' sequence + inner sequence + 3' sequence

SEQ ID NO: 51357 - DNA, 76 bp, Artificial Sequence; identical to SEQ ID NO: 47314
  Description of Artificial Sequence: Synthetic casein; 5' sequence + inner sequence + 3' sequence

SEQ ID NO: 51358 - DNA, 76 bp, Artificial Sequence; identical to SEQ ID NO: 19504
  Description of Artificial Sequence: Synthetic casein; 5' sequence + inner sequence + 3' sequence

SEQ ID NO: 51359 - DNA, 76 bp, Artificial Sequence; identical to SEQ ID NO: 11946
  Description of Artificial Sequence: Synthetic casein; 5' sequence + inner sequence + 3' sequence

SEQ ID NO: 51360 - DNA, 76 bp, Artificial Sequence; identical to SEQ ID NO: 47214
  Description of Artificial Sequence: Synthetic casein; 5' sequence + inner sequence + 3' sequence

SEQ ID NO: 51361 - DNA, 76 bp, Artificial Sequence; identical to SEQ ID NO: 3169
  Description of Artificial Sequence: Synthetic casein; 5' sequence + inner sequence + 3' sequence

SEQ ID NO: 51362 - DNA, 76 bp, Artificial Sequence; identical to SEQ ID NO: 47189
  Description of Artificial Sequence: Synthetic casein; 5' sequence + inner sequence + 3' sequence

SEQ ID NO: 51363 - DNA, 76 bp, Artificial Sequence; identical to SEQ ID NO: 11810
  Description of Artificial Sequence: Synthetic casein; 5' sequence + inner sequence + 3' sequence

SEQ ID NO: 51364 - DNA, 76 bp, Artificial Sequence; identical to SEQ ID NO: 47741
  Description of Artificial Sequence: Synthetic casein; 5' sequence + inner sequence + 3' sequence

SEQ ID NO: 51365 - DNA, 76 bp, Artificial Sequence; identical to SEQ ID NO: 31957
  Description of Artificial Sequence: Synthetic casein; 5' sequence + inner sequence + 3' sequence

SEQ ID NO: 51366 - DNA, 76 bp, Artificial Sequence; identical to SEQ ID NO: 19342
  Description of Artificial Sequence: Synthetic casein; 5' sequence + inner sequence + 3' sequence

SEQ ID NO: 51367 - DNA, 76 bp, Artificial Sequence; identical to SEQ ID NO: 47983
  Description of Artificial Sequence: Synthetic casein; 5' sequence + inner sequence + 3' sequence

SEQ ID NO: 51368 - DNA, 76 bp, Artificial Sequence; identical to SEQ ID NO: 3326
  Description of Artificial Sequence: Synthetic casein; 5' sequence + inner sequence + 3' sequence

SEQ ID NO: 51369 - DNA, 76 bp, Artificial Sequence; identical to SEQ ID NO: 31993
  Description of Artificial Sequence: Synthetic casein; 5' sequence + inner sequence + 3' sequence

SEQ ID NO: 51370 - DNA, 76 bp, Artificial Sequence; identical to SEQ ID NO: 31964
  Description of Artificial Sequence: Synthetic casein; 5' sequence + inner sequence + 3' sequence

SEQ ID NO: 51371 - DNA, 78 bp, Artificial Sequence; identical to SEQ ID NO: 47452
  Description of Artificial Sequence: Synthetic casein; 5' sequence + inner sequence + 3' sequence

SEQ ID NO: 51372 - DNA, 76 bp, Artificial Sequence; identical to SEQ ID NO: 3042
  Description of Artificial Sequence: Synthetic casein; 5' sequence + inner sequence + 3' sequence

SEQ ID NO: 51373 - DNA, 76 bp, Artificial Sequence; identical to SEQ ID NO: 47372
  Description of Artificial Sequence: Synthetic casein; 5' sequence + inner sequence + 3' sequence

SEQ ID NO: 51374 - DNA, 76 bp, Artificial Sequence; identical to SEQ ID NO: 3104
  Description of Artificial Sequence: Synthetic casein; 5' sequence + inner sequence + 3' sequence

SEQ ID NO: 51375 - DNA, 76 bp, Artificial Sequence; identical to SEQ ID NO: 31921
  Description of Artificial Sequence: Synthetic casein; 5' sequence + inner sequence + 3' sequence

SEQ ID NO: 51376 - DNA, 76 bp, Artificial Sequence; identical to SEQ ID NO: 3560
  Description of Artificial Sequence: Synthetic casein; 5' sequence + inner sequence + 3' sequence

SEQ ID NO: 51377 - DNA, 76 bp, Artificial Sequence; identical to SEQ ID NO: 3493
  Description of Artificial Sequence: Synthetic casein; 5' sequence + inner sequence + 3' sequence

SEQ ID NO: 51378 - DNA, 76 bp, Artificial Sequence; identical to SEQ ID NO: 19862
  Description of Artificial Sequence: Synthetic casein; 5' sequence + inner sequence + 3' sequence

SEQ ID NO: 51379 - DNA, 76 bp, Artificial Sequence; identical to SEQ ID NO: 7621
  Description of Artificial Sequence: Synthetic casein; 5' sequence + inner sequence + 3' sequence

SEQ ID NO: 51380 - DNA, 76 bp, Artificial Sequence; identical to SEQ ID NO: 31739
  Description of Artificial Sequence: Synthetic casein; 5' sequence + inner sequence + 3' sequence

SEQ ID NO: 51381 - DNA, 76 bp, Artificial Sequence; identical to SEQ ID NO: 3082
  Description of Artificial Sequence: Synthetic casein; 5' sequence + inner sequence + 3' sequence

SEQ ID NO: 51382 - DNA, 76 bp, Artificial Sequence
  Description of Artificial Sequence: Synthetic casein; 5' sequence + inner sequence + 3' sequence
tagggaagagaaggacatatgatggacgcaacgtaccgtatcatgtaggcatgttgactagtacatgaccacttga

SEQ ID NO: 51383 - DNA, 76 bp, Artificial Sequence; identical to SEQ ID NO: 31805
  Description of Artificial Sequence: Synthetic casein; 5' sequence + inner sequence + 3' sequence

SEQ ID NO: 51384 - DNA, 76 bp, Artificial Sequence; identical to SEQ ID NO: 47385
  Description of Artificial Sequence: Synthetic casein; 5' sequence + inner sequence + 3' sequence

SEQ ID NO: 51385 - DNA, 76 bp, Artificial Sequence; identical to SEQ ID NO: 3050
  Description of Artificial Sequence: Synthetic casein; 5' sequence + inner sequence + 3' sequence

SEQ ID NO: 51386 - DNA, 76 bp, Artificial Sequence; identical to SEQ ID NO: 47507
  Description of Artificial Sequence: Synthetic casein; 5' sequence + inner sequence + 3' sequence

SEQ ID NO: 51387 - DNA, 74 bp, Artificial Sequence
  Description of Artificial Sequence: Synthetic casein; 5' sequence + inner sequence + 3' sequence
tagggaagagaaggacatatgatggacgcaacgtaccttatcgtggccatgttgactagtacatgaccacttga

SEQ ID NO: 51388 - DNA, 76 bp, Artificial Sequence; identical to SEQ ID NO: 47305
  Description of Artificial Sequence: Synthetic casein; 5' sequence + inner sequence + 3' sequence

SEQ ID NO: 51389 - DNA, 76 bp, Artificial Sequence; identical to SEQ ID NO: 3098
  Description of Artificial Sequence: Synthetic casein; 5' sequence + inner sequence + 3' sequence

SEQ ID NO: 51390 - DNA, 76 bp, Artificial Sequence; identical to SEQ ID NO: 23722
  Description of Artificial Sequence: Synthetic casein; 5' sequence + inner sequence + 3' sequence

SEQ ID NO: 51391 - DNA, 76 bp, Artificial Sequence; identical to SEQ ID NO: 31312
  Description of Artificial Sequence: Synthetic casein; 5' sequence + inner sequence + 3' sequence

SEQ ID NO: 51392 - DNA, 76 bp, Artificial Sequence; identical to SEQ ID NO: 7576
  Description of Artificial Sequence: Synthetic casein; 5' sequence + inner sequence + 3' sequence

SEQ ID NO: 51393 - DNA, 76 bp, Artificial Sequence; identical to SEQ ID NO: 31503
  Description of Artificial Sequence: Synthetic casein; 5' sequence + inner sequence + 3' sequence

SEQ ID NO: 51394 - DNA, 76 bp, Artificial Sequence; identical to SEQ ID NO: 35384
  Description of Artificial Sequence: Synthetic casein; 5' sequence + inner sequence + 3' sequence

SEQ ID NO: 51395 - DNA, 76 bp, Artificial Sequence; identical to SEQ ID NO: 47657
  Description of Artificial Sequence: Synthetic casein; 5' sequence + inner sequence + 3' sequence

SEQ ID NO: 51396 - DNA, 76 bp, Artificial Sequence; identical to SEQ ID NO: 23983
  Description of Artificial Sequence: Synthetic casein; 5' sequence + inner sequence + 3' sequence

SEQ ID NO: 51397 - DNA, 76 bp, Artificial Sequence; identical to SEQ ID NO: 3152
  Description of Artificial Sequence: Synthetic casein; 5' sequence + inner sequence + 3' sequence

SEQ ID NO: 51398 - DNA, 76 bp, Artificial Sequence; identical to SEQ ID NO: 47846
  Description of Artificial Sequence: Synthetic casein; 5' sequence + inner sequence + 3' sequence

SEQ ID NO: 51399 - DNA, 76 bp, Artificial Sequence; identical to SEQ ID NO: 3634
  Description of Artificial Sequence: Synthetic casein; 5' sequence + inner sequence + 3' sequence

SEQ ID NO: 51400 - DNA, 76 bp, Artificial Sequence; identical to SEQ ID NO: 47225
  Description of Artificial Sequence: Synthetic casein; 5' sequence + inner sequence + 3' sequence

SEQ ID NO: 51401 - DNA, 76 bp, Artificial Sequence; identical to SEQ ID NO: 47547
  Description of Artificial Sequence: Synthetic casein; 5' sequence + inner sequence + 3' sequence

SEQ ID NO: 51402 - DNA, 76 bp, Artificial Sequence; identical to SEQ ID NO: 3857
  Description of Artificial Sequence: Synthetic casein; 5' sequence + inner sequence + 3' sequence

SEQ ID NO: 51403 - DNA, 76 bp, Artificial Sequence; identical to SEQ ID NO: 7579
  Description of Artificial Sequence: Synthetic casein; 5' sequence + inner sequence + 3' sequence

SEQ ID NO: 51404 - DNA, 76 bp, Artificial Sequence; identical to SEQ ID NO: 3236
  Description of Artificial Sequence: Synthetic casein; 5' sequence + inner sequence + 3' sequence

SEQ ID NO: 51405 - DNA, 76 bp, Artificial Sequence; identical to SEQ ID NO: 3291
  Description of Artificial Sequence: Synthetic casein; 5' sequence + inner sequence + 3' sequence

SEQ ID NO: 51406 - DNA, 76 bp, Artificial Sequence; identical to SEQ ID NO: 47465
  Description of Artificial Sequence: Synthetic casein; 5' sequence + inner sequence + 3' sequence

SEQ ID NO: 51407 - DNA, 76 bp, Artificial Sequence
  Description of Artificial Sequence: Synthetic casein; 5' sequence + inner sequence + 3' sequence
tagggaagagaaggacatatgatgcgtcacggatcatgcgtacgtatcgtgcgttgactagtacatgaccacttga

SEQ ID NO: 51408 - DNA, 76 bp, Artificial Sequence; identical to SEQ ID NO: 47388
  Description of Artificial Sequence: Synthetic casein; 5' sequence + inner sequence + 3' sequence

SEQ ID NO: 51409 - DNA, 76 bp, Artificial Sequence; identical to SEQ ID NO: 47509
  Description of Artificial Sequence: Synthetic casein; 5' sequence + inner sequence + 3' sequence

SEQ ID NO: 51410 - DNA, 76 bp, Artificial Sequence; identical to SEQ ID NO: 3275
  Description of Artificial Sequence: Synthetic casein; 5' sequence + inner sequence + 3' sequence

SEQ ID NO: 51411 - DNA, 76 bp, Artificial Sequence; identical to SEQ ID NO: 7419
  Description of Artificial Sequence: Synthetic casein; 5' sequence + inner sequence + 3' sequence

SEQ ID NO: 51412 - DNA, 76 bp, Artificial Sequence; identical to SEQ ID NO: 47454
  Description of Artificial Sequence: Synthetic casein; 5' sequence + inner sequence + 3' sequence

SEQ ID NO: 51413 - DNA, 76 bp, Artificial Sequence; identical to SEQ ID NO: 47444
  Description of Artificial Sequence: Synthetic casein; 5' sequence + inner sequence + 3' sequence

SEQ ID NO: 51414 - DNA, 76 bp, Artificial Sequence; identical to SEQ ID NO: 47886
  Description of Artificial Sequence: Synthetic casein; 5' sequence + inner sequence + 3' sequence

SEQ ID NO: 51415 - DNA, 76 bp, Artificial Sequence; identical to SEQ ID NO: 3647
  Description of Artificial Sequence: Synthetic casein; 5' sequence + inner sequence + 3' sequence

SEQ ID NO: 51416 - DNA, 76 bp, Artificial Sequence; identical to SEQ ID NO: 47367
  Description of Artificial Sequence: Synthetic casein; 5' sequence + inner sequence + 3' sequence

SEQ ID NO: 51417 - DNA, 76 bp, Artificial Sequence; identical to SEQ ID NO: 47878
  Description of Artificial Sequence: Synthetic casein; 5' sequence + inner sequence + 3' sequence

SEQ ID NO: 51418 - DNA, 76 bp, Artificial Sequence
  Description of Artificial Sequence: Synthetic casein; 5' sequence + inner sequence + 3' sequence
tagggaagagaaggacatatgatgttgcgcacacataccgttcgtacgtcacgttgactagtacatgaccacttga

SEQ ID NO: 51419 - DNA, 76 bp, Artificial Sequence; identical to SEQ ID NO: 8000
  Description of Artificial Sequence: Synthetic casein; 5' sequence + inner sequence + 3' sequence

SEQ ID NO: 51420 - DNA, 76 bp, Artificial Sequence; identical to SEQ ID NO: 3090
  Description of Artificial Sequence: Synthetic casein; 5' sequence + inner sequence + 3' sequence

SEQ ID NO: 51421 - DNA, 76 bp, Artificial Sequence; identical to SEQ ID NO: 31659
  Description of Artificial Sequence: Synthetic casein; 5' sequence + inner sequence + 3' sequence

SEQ ID NO: 51422 - DNA, 76 bp, Artificial Sequence; identical to SEQ ID NO: 47370
  Description of Artificial Sequence: Synthetic casein; 5' sequence + inner sequence + 3' sequence

SEQ ID NO: 51423 - DNA, 76 bp, Artificial Sequence; identical to SEQ ID NO: 3561
  Description of Artificial Sequence: Synthetic casein; 5' sequence + inner sequence + 3' sequence

SEQ ID NO: 51424 - DNA, 76 bp, Artificial Sequence; identical to SEQ ID NO: 47391
  Description of Artificial Sequence: Synthetic casein; 5' sequence + inner sequence + 3' sequence

SEQ ID NO: 51425 - DNA, 76 bp, Artificial Sequence; identical to SEQ ID NO: 47287
  Description of Artificial Sequence: Synthetic casein; 5' sequence + inner sequence + 3' sequence

SEQ ID NO: 51426 - DNA, 76 bp, Artificial Sequence; identical to SEQ ID NO: 31914
  Description of Artificial Sequence: Synthetic casein; 5' sequence + inner sequence + 3' sequence

SEQ ID NO: 51427 - DNA, 76 bp, Artificial Sequence; identical to SEQ ID NO: 11928
  Description of Artificial Sequence: Synthetic casein; 5' sequence + inner sequence + 3' sequence

SEQ ID NO: 51428 - DNA, 76 bp, Artificial Sequence; identical to SEQ ID NO: 23776
  Description of Artificial Sequence: Synthetic casein; 5' sequence + inner sequence + 3' sequence

SEQ ID NO: 51429 - DNA, 76 bp, Artificial Sequence; identical to SEQ ID NO: 3492
  Description of Artificial Sequence: Synthetic casein; 5' sequence + inner sequence + 3' sequence

SEQ ID NO: 51430 - DNA, 76 bp, Artificial Sequence; identical to SEQ ID NO: 7933
  Description of Artificial Sequence: Synthetic casein; 5' sequence + inner sequence + 3' sequence

SEQ ID NO: 51431 - DNA, 75 bp, Artificial Sequence
  Description of Artificial Sequence: Synthetic casein; 5' sequence + inner sequence + 3' sequence
tagggaagagaaggacatatgatgcgtgtgacgtgcagcatgtgtcgtgacattgactagtacatgaccacttga

SEQ ID NO: 51432 - DNA, 76 bp, Artificial Sequence; identical to SEQ ID NO: 3375
  Description of Artificial Sequence: Synthetic casein; 5' sequence + inner sequence + 3' sequence

SEQ ID NO: 51433 - DNA, 76 bp, Artificial Sequence; identical to SEQ ID NO: 47873
  Description of Artificial Sequence: Synthetic casein; 5' sequence + inner sequence + 3' sequence

SEQ ID NO: 51434 - DNA, 76 bp, Artificial Sequence; identical to SEQ ID NO: 3742
  Description of Artificial Sequence: Synthetic casein; 5' sequence + inner sequence + 3' sequence

SEQ ID NO: 51435 - DNA, 76 bp, Artificial Sequence
  Description of Artificial Sequence: Synthetic casein; 5' sequence + inner sequence + 3' sequence
tagggaagagaaggacatatgatcgatacgtaggcatggcgtgtacgtgcacattgactagtacatgaccacttga

SEQ ID NO: 51436 - DNA, 76 bp, Artificial Sequence; identical to SEQ ID NO: 47859
  Description of Artificial Sequence: Synthetic casein; 5' sequence + inner sequence + 3' sequence

SEQ ID NO: 51437 - DNA, 76 bp, Artificial Sequence; identical to SEQ ID NO: 19389
  Description of Artificial Sequence: Synthetic casein; 5' sequence + inner sequence + 3' sequence

SEQ ID NO: 51438 - DNA, 76 bp, Artificial Sequence; identical to SEQ ID NO: 31665
  Description of Artificial Sequence: Synthetic casein; 5' sequence + inner sequence + 3' sequence

SEQ ID NO: 51439 - DNA, 76 bp, Artificial Sequence; identical to SEQ ID NO: 47389
  Description of Artificial Sequence: Synthetic casein; 5' sequence + inner sequence + 3' sequence

SEQ ID NO: 51440 - DNA, 76 bp, Artificial Sequence
  Description of Artificial Sequence: Synthetic casein; 5' sequence + inner sequence + 3' sequence
tagggaagagaaggacatatgatggacgcaacgtaccgtctcgtggccatgtgttgactagtacatgaccacttga

SEQ ID NO: 51441 - DNA, 76 bp, Artificial Sequence; identical to SEQ ID NO: 3061
  Description of Artificial Sequence: Synthetic casein; 5' sequence + inner sequence + 3' sequence

SEQ ID NO: 51442 - DNA, 76 bp, Artificial Sequence; identical to SEQ ID NO: 7867
  Description of Artificial Sequence: Synthetic casein; 5' sequence + inner sequence + 3' sequence

SEQ ID NO: 51443 - DNA, 76 bp, Artificial Sequence; identical to SEQ ID NO: 23784
  Description of Artificial Sequence: Synthetic casein; 5' sequence + inner sequence + 3' sequence

SEQ ID NO: 51444 - DNA, 77 bp, Artificial Sequence; identical to SEQ ID NO: 3221
  Description of Artificial Sequence: Synthetic casein; 5' sequence + inner sequence + 3' sequence

SEQ ID NO: 51445 - DNA, 76 bp, Artificial Sequence; identical to SEQ ID NO: 31306
  Description of Artificial Sequence: Synthetic casein; 5' sequence + inner sequence + 3' sequence

SEQ ID NO: 51446 - DNA, 76 bp, Artificial Sequence
  Description of Artificial Sequence: Synthetic casein; 5' sequence + inner sequence + 3' sequence
tagggaagagaaggacatatgatgcgtcacagcacatcgccttactcgtcacgttgactagtacatgaccacttga

SEQ ID NO: 51447 - DNA, 76 bp, Artificial Sequence; identical to SEQ ID NO: 47560
  Description of Artificial Sequence: Synthetic casein; 5' sequence + inner sequence + 3' sequence

SEQ ID NO: 51448 - DNA, 76 bp, Artificial Sequence; identical to SEQ ID NO: 7653
  Description of Artificial Sequence: Synthetic casein; 5' sequence + inner sequence + 3' sequence

SEQ ID NO: 51449 - DNA, 76 bp, Artificial Sequence
  Description of Artificial Sequence: Synthetic casein; 5' sequence + inner sequence + 3' sequence
tagggaagagaaggacatatgatcgtcacgcagtacgttcgcattacgtcacattgactagtacatgaccacttga

SEQ ID NO: 51450 - DNA, 76 bp, Artificial Sequence; identical to SEQ ID NO: 3661
  Description of Artificial Sequence: Synthetic casein; 5' sequence + inner sequence + 3' sequence

SEQ ID NO: 51451 - DNA, 76 bp, Artificial Sequence; identical to SEQ ID NO: 3173
  Description of Artificial Sequence: Synthetic casein; 5' sequence + inner sequence + 3' sequence

SEQ ID NO: 51452 - DNA, 76 bp, Artificial Sequence; identical to SEQ ID NO: 19457
  Description of Artificial Sequence: Synthetic casein; 5' sequence + inner sequence + 3' sequence

SEQ ID NO: 51453 - DNA, 76 bp, Artificial Sequence; identical to SEQ ID NO: 3247
  Description of Artificial Sequence: Synthetic casein; 5' sequence + inner sequence + 3' sequence

SEQ ID NO: 51454 - DNA, 76 bp, Artificial Sequence; identical to SEQ ID NO: 47565
  Description of Artificial Sequence: Synthetic casein; 5' sequence + inner sequence + 3' sequence

SEQ ID NO: 51455 - DNA, 76 bp, Artificial Sequence
  Description of Artificial Sequence: Synthetic casein; 5' sequence + inner sequence + 3' sequence
tagggaagagaaggacatatgatcgtaacgcgcatcgtacgtgtgacgcatcgttgactagtacatgaccacttga

SEQ ID NO: 51456 - DNA, 76 bp, Artificial Sequence
  Description of Artificial Sequence: Synthetic casein; 5' sequence + inner sequence + 3' sequence
tagggaagagaaggacatatgatgcgttacggtgcatgacgccttccgacacgttgactagtacatgaccacttga

SEQ ID NO: 51457 - DNA, 76 bp, Artificial Sequence; identical to SEQ ID NO: 7543
  Description of Artificial Sequence: Synthetic casein; 5' sequence + inner sequence + 3' sequence

SEQ ID NO: 51458 - DNA, 76 bp, Artificial Sequence
  Description of Artificial Sequence: Synthetic casein; 5' sequence + inner sequence + 3' sequence
tagggaagagaaggacatatgatgcgatgcgcgttacgtacgacatcgacacgttgactagtacatgaccacttga

SEQ ID NO: 51459 - DNA, 76 bp, Artificial Sequence; identical to SEQ ID NO: 15743
  Description of Artificial Sequence: Synthetic casein; 5' sequence + inner sequence + 3' sequence

SEQ ID NO: 51460 - DNA, 76 bp, Artificial Sequence
  Description of Artificial Sequence: Synthetic casein; 5' sequence + inner sequence + 3' sequence
tagggaagagaaggacatatgatgcgtgaggcaacgtagcgtacgtcgtcgcattgactagtacatgaccacttga

SEQ ID NO: 51461 - DNA, 76 bp, Artificial Sequence; identical to SEQ ID NO: 19769
  Description of Artificial Sequence: Synthetic casein; 5' sequence + inner sequence + 3' sequence

SEQ ID NO: 51462 - DNA, 76 bp, Artificial Sequence; identical to SEQ ID NO: 23496
  Description of Artificial Sequence: Synthetic casein; 5' sequence + inner sequence + 3' sequence

SEQ ID NO: 51463 - DNA, 76 bp, Artificial Sequence; identical to SEQ ID NO: 7924
  Description of Artificial Sequence: Synthetic casein; 5' sequence + inner sequence + 3' sequence

SEQ ID NO: 51464 - DNA, 76 bp, Artificial Sequence
  Description of Artificial Sequence: Synthetic casein; 5' sequence + inner sequence + 3' sequence
tagggaagagaaggacatatgatgctgtggcagtacgtatgccctgcgtcacgttgactagtacatgaccacttga

SEQ ID NO: 51465 - DNA, 76 bp, Artificial Sequence; identical to SEQ ID NO: 3219
  Description of Artificial Sequence: Synthetic casein; 5' sequence + inner sequence + 3' sequence

SEQ ID NO: 51466 - DNA, 76 bp, Artificial Sequence
  Description of Artificial Sequence: Synthetic casein; 5' sequence + inner sequence + 3' sequence
tagggaagagaaggacatatgatacgtcacacgctgcgtaacgacacgtcacattgactagtacatgaccacttga

SEQ ID NO: 51467 - DNA, 76 bp, Artificial Sequence; identical to SEQ ID NO: 8002
  Description of Artificial Sequence: Synthetic casein; 5' sequence + inner sequence + 3' sequence

SEQ ID NO: 51468 - DNA, 76 bp, Artificial Sequence
  Description of Artificial Sequence: Synthetic casein; 5' sequence + inner sequence + 3' sequence
tagggaagagaaggacatatgatgcactgcacgcaccctatcatggcggcatgttgactagtacatgaccacttga

SEQ ID NO: 51469 - DNA, 76 bp, Artificial Sequence; identical to SEQ ID NO: 19612
  Description of Artificial Sequence: Synthetic casein; 5' sequence + inner sequence + 3' sequence

SEQ ID NO: 51470 - DNA, 76 bp, Artificial Sequence; identical to SEQ ID NO: 31668
  Description of Artificial Sequence: Synthetic casein; 5' sequence + inner sequence + 3' sequence

SEQ ID NO: 51471 - DNA, 76 bp, Artificial Sequence; identical to SEQ ID NO: 19718
  Description of Artificial Sequence: Synthetic casein; 5' sequence + inner sequence + 3' sequence

SEQ ID NO: 51472 - DNA, 76 bp, Artificial Sequence; identical to SEQ ID NO: 3229
  Description of Artificial Sequence: Synthetic casein; 5' sequence + inner sequence + 3' sequence

SEQ ID NO: 51473 - DNA, 76 bp, Artificial Sequence; identical to SEQ ID NO: 23683
  Description of Artificial Sequence: Synthetic casein; 5' sequence + inner sequence + 3' sequence

SEQ ID NO: 51474 - DNA, 76 bp, Artificial Sequence; identical to SEQ ID NO: 3076
  Description of Artificial Sequence: Synthetic casein; 5' sequence + inner sequence + 3' sequence

SEQ ID NO: 51475 - DNA, 76 bp, Artificial Sequence; identical to SEQ ID NO: 47425
  Description of Artificial Sequence: Synthetic casein; 5' sequence + inner sequence + 3' sequence

SEQ ID NO: 51476 - DNA, 76 bp, Artificial Sequence; identical to SEQ ID NO: 31584
  Description of Artificial Sequence: Synthetic casein; 5' sequence + inner sequence + 3' sequence

SEQ ID NO: 51477 - DNA, 76 bp, Artificial Sequence; identical to SEQ ID NO: 19709
  Description of Artificial Sequence: Synthetic casein; 5' sequence + inner sequence + 3' sequence

SEQ ID NO: 51478 - DNA, 76 bp, Artificial Sequence; identical to SEQ ID NO: 47426
  Description of Artificial Sequence: Synthetic casein; 5' sequence + inner sequence + 3' sequence

SEQ ID NO: 51479 - DNA, 76 bp, Artificial Sequence; identical to SEQ ID NO: 23880
  Description of Artificial Sequence: Synthetic casein; 5' sequence + inner sequence + 3' sequence

SEQ ID NO: 51480 - DNA, 76 bp, Artificial Sequence
  Description of Artificial Sequence: Synthetic casein; 5' sequence + inner sequence + 3' sequence
tagggaagagaaggacatatgatgtcacgcgatgcatggtacgttgcgacacgttgactagtacatgaccacttga

SEQ ID NO: 51481 - DNA, 74 bp, Artificial Sequence; identical to SEQ ID NO: 19802
  Description of Artificial Sequence: Synthetic casein; 5' sequence + inner sequence + 3' sequence

SEQ ID NO: 51482 - DNA, 76 bp, Artificial Sequence
  Description of Artificial Sequence: Synthetic casein; 5' sequence + inner sequence + 3' sequence
tagggaagagaaggacatatgatgcatatcgcacagtacgtcactgcgtcacgttgactagtacatgaccacttga

SEQ ID NO: 51483 - DNA, 76 bp, Artificial Sequence; identical to SEQ ID NO: 47894
  Description of Artificial Sequence: Synthetic casein; 5' sequence + inner sequence + 3' sequence

SEQ ID NO: 51484 - DNA, 76 bp, Artificial Sequence; identical to SEQ ID NO: 19988
  Description of Artificial Sequence: Synthetic casein; 5' sequence + inner sequence + 3' sequence

SEQ ID NO: 51485 - DNA, 76 bp, Artificial Sequence; identical to SEQ ID NO: 47651
  Description of Artificial Sequence: Synthetic casein; 5' sequence + inner sequence + 3' sequence

SEQ ID NO: 51486 - DNA, 76 bp, Artificial Sequence
  Description of Artificial Sequence: Synthetic casein; 5' sequence + inner sequence + 3' sequence
tagggaagagaaggacatatgatgcgtcgtaacgtcacgtccgtcgctacacgttgactagtacatgaccacttga

SEQ ID NO: 51487 - DNA, 76 bp, Artificial Sequence; identical to SEQ ID NO: 3136
  Description of Artificial Sequence: Synthetic casein; 5' sequence + inner sequence + 3' sequence

SEQ ID NO: 51488 - DNA, 76 bp, Artificial Sequence; identical to SEQ ID NO: 47627
  Description of Artificial Sequence: Synthetic casein; 5' sequence + inner sequence + 3' sequence

SEQ ID NO: 51489 - DNA, 76 bp, Artificial Sequence; identical to SEQ ID NO: 47470
  Description of Artificial Sequence: Synthetic casein; 5' sequence + inner sequence + 3' sequence

SEQ ID NO: 51490 - DNA, 76 bp, Artificial Sequence
  Description of Artificial Sequence: Synthetic casein; 5' sequence + inner sequence + 3' sequence
tagggaagagaaggacatatgatgcataccgtgtgtgcgtcggtccgtacgcgttgactagtacatgaccacttga

SEQ ID NO: 51491 - DNA, 76 bp, Artificial Sequence; identical to SEQ ID NO: 3507
  Description of Artificial Sequence: Synthetic casein; 5' sequence + inner sequence + 3' sequence

SEQ ID NO: 51492 - DNA, 76 bp, Artificial Sequence; identical to SEQ ID NO: 19651
  Description of Artificial Sequence: Synthetic casein; 5' sequence + inner sequence + 3' sequence

SEQ ID NO: 51493 - DNA, 76 bp, Artificial Sequence; identical to SEQ ID NO: 3242
  Description of Artificial Sequence: Synthetic casein; 5' sequence + inner sequence + 3' sequence

SEQ ID NO: 51494 - DNA, 76 bp, Artificial Sequence; identical to SEQ ID NO: 23530
  Description of Artificial Sequence: Synthetic casein; 5' sequence + inner sequence + 3' sequence

SEQ ID NO: 51495 - DNA, 76 bp, Artificial Sequence; identical to SEQ ID NO: 3277
  Description of Artificial Sequence: Synthetic casein; 5' sequence + inner sequence + 3' sequence

SEQ ID NO: 51496 - DNA, 76 bp, Artificial Sequence; identical to SEQ ID NO: 23580
  Description of Artificial Sequence: Synthetic casein; 5' sequence + inner sequence + 3' sequence

SEQ ID NO: 51497 - DNA, 76 bp, Artificial Sequence; identical to SEQ ID NO: 3217
  Description of Artificial Sequence: Synthetic casein; 5' sequence + inner sequence + 3' sequence

SEQ ID NO: 51498 - DNA, 76 bp, Artificial Sequence; identical to SEQ ID NO: 7988
  Description of Artificial Sequence: Synthetic casein; 5' sequence + inner sequence + 3' sequence

SEQ ID NO: 51499 - DNA, 76 bp, Artificial Sequence; identical to SEQ ID NO: 47853
  Description of Artificial Sequence: Synthetic casein; 5' sequence + inner sequence + 3' sequence

SEQ ID NO: 51500 - DNA, 76 bp, Artificial Sequence; identical to SEQ ID NO: 19829
  Description of Artificial Sequence: Synthetic casein; 5' sequence + inner sequence + 3' sequence

SEQ ID NO: 51501 - DNA, 76 bp, Artificial Sequence; identical to SEQ ID NO: 35505
  Description of Artificial Sequence: Synthetic casein; 5' sequence + inner sequence + 3' sequence

SEQ ID NO: 51502 - DNA, 76 bp, Artificial Sequence; identical to SEQ ID NO: 31814
  Description of Artificial Sequence: Synthetic casein; 5' sequence + inner sequence + 3' sequence

SEQ ID NO: 51503 - DNA, 76 bp, Artificial Sequence; identical to SEQ ID NO: 23903
  Description of Artificial Sequence: Synthetic casein; 5' sequence + inner sequence + 3' sequence

SEQ ID NO: 51504 - DNA, 76 bp, Artificial Sequence
  Description of Artificial Sequence: Synthetic casein; 5' sequence + inner sequence + 3' sequence
tagggaagagaaggacatatgatgcgatgcacgtcaacactacgtccttcacgttgactagtacatgaccacttga

SEQ ID NO: 51505 - DNA, 76 bp, Artificial Sequence; identical to SEQ ID NO: 47966
  Description of Artificial Sequence: Synthetic casein; 5' sequence + inner sequence + 3' sequence

SEQ ID NO: 51506 - DNA, 76 bp, Artificial Sequence; identical to SEQ ID NO: 19892
  Description of Artificial Sequence: Synthetic casein; 5' sequence + inner sequence + 3' sequence

SEQ ID NO: 51507 - DNA, 76 bp, Artificial Sequence
  Description of Artificial Sequence: Synthetic casein; 5' sequence + inner sequence + 3' sequence
tagggaagagaaggacatatgatgcgatacgcaaggacggcatgacctacgcattgactagtacatgaccacttga

SEQ ID NO: 51508 - DNA, 76 bp, Artificial Sequence
  Description of Artificial Sequence: Synthetic casein; 5' sequence + inner sequence + 3' sequence
tagggaagagaaggacatatgatgtgcgtcacgttcccatcatgtacgacacgttgactagtacatgaccacttga

SEQ ID NO: 51509 - DNA, 76 bp, Artificial Sequence; identical to SEQ ID NO: 47751
  Description of Artificial Sequence: Synthetic casein; 5' sequence + inner sequence + 3' sequence

SEQ ID NO: 51510 - DNA, 76 bp, Artificial Sequence; identical to SEQ ID NO: 31806
  Description of Artificial Sequence: Synthetic casein; 5' sequence + inner sequence + 3' sequence

SEQ ID NO: 51511 - DNA, 76 bp, Artificial Sequence; identical to SEQ ID NO: 31984
  Description of Artificial Sequence: Synthetic casein; 5' sequence + inner sequence + 3' sequence

SEQ ID NO: 51512 - DNA, 76 bp, Artificial Sequence; identical to SEQ ID NO: 3407
  Description of Artificial Sequence: Synthetic casein; 5' sequence + inner sequence + 3' sequence

SEQ ID NO: 51513 - DNA, 76 bp, Artificial Sequence; identical to SEQ ID NO: 23972
  Description of Artificial Sequence: Synthetic casein; 5' sequence + inner sequence + 3' sequence

SEQ ID NO: 51514 - DNA, 76 bp, Artificial Sequence; identical to SEQ ID NO: 7603
  Description of Artificial Sequence: Synthetic casein; 5' sequence + inner sequence + 3' sequence

SEQ ID NO: 51515 - DNA, 76 bp, Artificial Sequence; identical to SEQ ID NO: 3398
  Description of Artificial Sequence: Synthetic casein; 5' sequence + inner sequence + 3' sequence

SEQ ID NO: 51516 - DNA, 76 bp, Artificial Sequence; identical to SEQ ID NO: 7420
  Description of Artificial Sequence: Synthetic casein; 5' sequence + inner sequence + 3' sequence

SEQ ID NO: 51517 - DNA, 75 bp, Artificial Sequence; identical to SEQ ID NO: 47766
  Description of Artificial Sequence: Synthetic casein; 5' sequence + inner sequence + 3' sequence

SEQ ID NO: 51518 - DNA, 76 bp, Artificial Sequence
  Description of Artificial Sequence: Synthetic casein; 5' sequence + inner sequence + 3' sequence
tagggaagagaaggacatatgatcgtgacgcatgtgaggcatcgtgtgtcgcgttgactagtacatgaccacttga

SEQ ID NO: 51519 - DNA, 76 bp, Artificial Sequence; identical to SEQ ID NO: 47312
  Description of Artificial Sequence: Synthetic casein; 5' sequence + inner sequence + 3' sequence

SEQ ID NO: 51520 - DNA, 76 bp, Artificial Sequence; identical to SEQ ID NO: 3317
  Description of Artificial Sequence: Synthetic casein; 5' sequence + inner sequence + 3' sequence

SEQ ID NO: 51521 - DNA, 76 bp, Artificial Sequence
  Description of Artificial Sequence: Synthetic casein; 5' sequence + inner sequence + 3' sequence
tagggaagagaaggacatatgatgcatgtgacgacgatgtgccgtgatgcatgttgactagtacatgaccacttga

SEQ ID NO: 51522 - DNA, 76 bp, Artificial Sequence; identical to SEQ ID NO: 47752
  Description of Artificial Sequence: Synthetic casein; 5' sequence + inner sequence + 3' sequence

SEQ ID NO: 51523 - DNA, 76 bp, Artificial Sequence; identical to SEQ ID NO: 3142
  Description of Artificial Sequence: Synthetic casein; 5' sequence + inner sequence + 3' sequence

SEQ ID NO: 51524 - DNA, 76 bp, Artificial Sequence; identical to SEQ ID NO: 31670
  Description of Artificial Sequence: Synthetic casein; 5' sequence + inner sequence + 3' sequence

SEQ ID NO: 51525 - DNA, 76 bp, Artificial Sequence; identical to SEQ ID NO: 31753
  Description of Artificial Sequence: Synthetic casein; 5' sequence + inner sequence + 3' sequence

SEQ ID NO: 51526 - DNA, 76 bp, Artificial Sequence; identical to SEQ ID NO: 31741
  Description of Artificial Sequence: Synthetic casein; 5' sequence + inner sequence + 3' sequence

SEQ ID NO: 51527 - DNA, 76 bp, Artificial Sequence; identical to SEQ ID NO: 15821
  Description of Artificial Sequence: Synthetic casein; 5' sequence + inner sequence + 3' sequence

SEQ ID NO: 51528 - DNA, 76 bp, Artificial Sequence; identical to SEQ ID NO: 3369
  Description of Artificial Sequence: Synthetic casein; 5' sequence + inner sequence + 3' sequence

SEQ ID NO: 51529 - DNA, 76 bp, Artificial Sequence; identical to SEQ ID NO: 23817
  Description of Artificial Sequence: Synthetic casein; 5' sequence + inner sequence + 3' sequence

SEQ ID NO: 51530 - DNA, 76 bp, Artificial Sequence; identical to SEQ ID NO: 3032
  Description of Artificial Sequence: Synthetic casein; 5' sequence + inner sequence + 3' sequence

SEQ ID NO: 51531 - DNA, 76 bp, Artificial Sequence
  Description of Artificial Sequence: Synthetic casein; 5' sequence + inner sequence + 3' sequence
tagggaagagaaggacatatgatgcgtcacggtgatgcgttgtgctgttcgtgttgactagtacatgaccacttga

SEQ ID NO: 51532 - DNA, 76 bp, Artificial Sequence; identical to SEQ ID NO: 3420
  Description of Artificial Sequence: Synthetic casein; 5' sequence + inner sequence + 3' sequence

SEQ ID NO: 51533 - DNA, 76 bp, Artificial Sequence; identical to SEQ ID NO: 31980
  Description of Artificial Sequence: Synthetic casein; 5' sequence + inner sequence + 3' sequence

SEQ ID NO: 51534 - DNA, 76 bp, Artificial Sequence; identical to SEQ ID NO: 19688
  Description of Artificial Sequence: Synthetic casein; 5' sequence + inner sequence + 3' sequence

SEQ ID NO: 51535 - DNA, 76 bp, Artificial Sequence; identical to SEQ ID NO: 3583
  Description of Artificial Sequence: Synthetic casein; 5' sequence + inner sequence + 3' sequence

SEQ ID NO: 51536 - DNA, 76 bp, Artificial Sequence; identical to SEQ ID NO: 31412
  Description of Artificial Sequence: Synthetic casein; 5' sequence + inner sequence + 3' sequence

SEQ ID NO: 51537 - DNA, 76 bp, Artificial Sequence; identical to SEQ ID NO: 11953
  Description of Artificial Sequence: Synthetic casein; 5' sequence + inner sequence + 3' sequence

SEQ ID NO: 51538 - DNA, 76 bp, Artificial Sequence; identical to SEQ ID NO: 47841
  Description of Artificial Sequence: Synthetic casein; 5' sequence + inner sequence + 3' sequence

SEQ ID NO: 51539 - DNA, 76 bp, Artificial Sequence; identical to SEQ ID NO: 47412
  Description of Artificial Sequence: Synthetic casein; 5' sequence + inner sequence + 3' sequence

SEQ ID NO: 51540 - DNA, 76 bp, Artificial Sequence; identical to SEQ ID NO: 7356
  Description of Artificial Sequence: Synthetic casein; 5' sequence + inner sequence + 3' sequence

SEQ ID NO: 51541 - DNA, 76 bp, Artificial Sequence; identical to SEQ ID NO: 11938
  Description of Artificial Sequence: Synthetic casein; 5' sequence + inner sequence + 3' sequence

SEQ ID NO: 51542 - DNA, 76 bp, Artificial Sequence; identical to SEQ ID NO: 47781
  Description of Artificial Sequence: Synthetic casein; 5' sequence + inner sequence + 3' sequence

SEQ ID NO: 51543 - DNA, 76 bp, Artificial Sequence; identical to SEQ ID NO: 3223
  Description of Artificial Sequence: Synthetic casein; 5' sequence + inner sequence + 3' sequence

SEQ ID NO: 51544 - DNA, 76 bp, Artificial Sequence; identical to SEQ ID NO: 47838
  Description of Artificial Sequence: Synthetic casein; 5' sequence + inner sequence + 3' sequence

SEQ ID NO: 51545 - DNA, 74 bp, Artificial Sequence; identical to SEQ ID NO: 3148
  Description of Artificial Sequence: Synthetic casein; 5' sequence + inner sequence + 3' sequence

SEQ ID NO: 51546 - DNA, 76 bp, Artificial Sequence; identical to SEQ ID NO: 23960
  Description of Artificial Sequence: Synthetic casein; 5' sequence + inner sequence + 3' sequence

SEQ ID NO: 51547 - DNA, 76 bp, Artificial Sequence; identical to SEQ ID NO: 47597
  Description of Artificial Sequence: Synthetic casein; 5' sequence + inner sequence + 3' sequence

SEQ ID NO: 51548 - DNA, 76 bp, Artificial Sequence; identical to SEQ ID NO: 23426
  Description of Artificial Sequence: Synthetic casein; 5' sequence + inner sequence + 3' sequence

SEQ ID NO: 51549 - DNA, 76 bp, Artificial Sequence; identical to SEQ ID NO: 3072
  Description of Artificial Sequence: Synthetic casein; 5' sequence + inner sequence + 3' sequence

SEQ ID NO: 51550 - DNA, 76 bp, Artificial Sequence; identical to SEQ ID NO: 7748
  Description of Artificial Sequence: Synthetic casein; 5' sequence + inner sequence + 3' sequence

SEQ ID NO: 51551 - DNA, 76 bp, Artificial Sequence; identical to SEQ ID NO: 3805
  Description of Artificial Sequence: Synthetic casein; 5' sequence + inner sequence + 3' sequence

SEQ ID NO: 51552 - DNA, 76 bp, Artificial Sequence; identical to SEQ ID NO: 47595
  Description of Artificial Sequence: Synthetic casein; 5' sequence + inner sequence + 3' sequence

SEQ ID NO: 51553 - DNA, 76 bp, Artificial Sequence; identical to SEQ ID NO: 47422
  Description of Artificial Sequence: Synthetic casein; 5' sequence + inner sequence + 3' sequence

SEQ ID NO: 51554 - DNA, 76 bp, Artificial Sequence; identical to SEQ ID NO: 47527
  Description of Artificial Sequence: Synthetic casein; 5' sequence + inner sequence + 3' sequence

SEQ ID NO: 51555 - DNA, 76 bp, Artificial Sequence; identical to SEQ ID NO: 20001
  Description of Artificial Sequence: Synthetic casein; 5' sequence + inner sequence + 3' sequence

SEQ ID NO: 51556 - DNA, 76 bp, Artificial Sequence; identical to SEQ ID NO: 3110
  Description of Artificial Sequence: Synthetic casein; 5' sequence + inner sequence + 3' sequence

SEQ ID NO: 51557 - DNA, 76 bp, Artificial Sequence
  Description of Artificial Sequence: Synthetic casein; 5' sequence + inner sequence + 3' sequence
tagggaagagaaggacatatgatgcgacatcgtagcatggtccttgctgcacgttgactagtacatgaccacttga

SEQ ID NO: 51558 - DNA, 76 bp, Artificial Sequence; identical to SEQ ID NO: 7890
  Description of Artificial Sequence: Synthetic casein; 5' sequence + inner sequence + 3' sequence

SEQ ID NO: 51559 - DNA, 76 bp, Artificial Sequence; identical to SEQ ID NO: 47910
  Description of Artificial Sequence: Synthetic casein; 5' sequence + inner sequence + 3' sequence

SEQ ID NO: 51560 - DNA, 76 bp, Artificial Sequence; identical to SEQ ID NO: 47704
  Description of Artificial Sequence: Synthetic casein; 5' sequence + inner sequence + 3' sequence

SEQ ID NO: 51561 - DNA, 75 bp, Artificial Sequence
  Description of Artificial Sequence: Synthetic casein; 5' sequence + inner sequence + 3' sequence
tagggaagagaaggacatatgatggacgcagcgaaccgtacgtggacgtgcattgactagtacatgaccacttga

SEQ ID NO: 51562 - DNA, 76 bp, Artificial Sequence; identical to SEQ ID NO: 3205
  Description of Artificial Sequence: Synthetic casein; 5' sequence + inner sequence + 3' sequence

SEQ ID NO: 51563 - DNA, 76 bp, Artificial Sequence; identical to SEQ ID NO: 23596
  Description of Artificial Sequence: Synthetic casein; 5' sequence + inner sequence + 3' sequence

SEQ ID NO: 51564 - DNA, 76 bp, Artificial Sequence; identical to SEQ ID NO: 3086
  Description of Artificial Sequence: Synthetic casein; 5' sequence + inner sequence + 3' sequence

SEQ ID NO: 51565 - DNA, 76 bp, Artificial Sequence
  Description of Artificial Sequence: Synthetic casein; 5' sequence + inner sequence + 3' sequence
tagggaagagaaggacatatgatgcatgtcgtgcgatgtcgttgtgctgcacgttgactagtacatgaccacttga

SEQ ID NO: 51566 - DNA, 76 bp, Artificial Sequence; identical to SEQ ID NO: 3678
  Description of Artificial Sequence: Synthetic casein; 5' sequence + inner sequence + 3' sequence

SEQ ID NO: 51567 - DNA, 74 bp, Artificial Sequence
  Description of Artificial Sequence: Synthetic casein; 5' sequence + inner sequence + 3' sequence
tagggaagagaaggacatatgatggccgcaacgtaccgtatcgtggccatgttgactagtacatgaccacttga

SEQ ID NO: 51568 - DNA, 76 bp, Artificial Sequence
  Description of Artificial Sequence: Synthetic casein; 5' sequence + inner sequence + 3' sequence
tagggaagagaaggacatatgatcgtacgcaagggcacggtacgtacgacacgttgactagtacatgaccacttga

SEQ ID NO: 51569 - DNA, 76 bp, Artificial Sequence; identical to SEQ ID NO: 19748
  Description of Artificial Sequence: Synthetic casein; 5' sequence + inner sequence + 3' sequence

SEQ ID NO: 51570 - DNA, 76 bp, Artificial Sequence; identical to SEQ ID NO: 7987
  Description of Artificial Sequence: Synthetic casein; 5' sequence + inner sequence + 3' sequence

SEQ ID NO: 51571 - DNA, 76 bp, Artificial Sequence
  Description of Artificial Sequence: Synthetic casein; 5' sequence + inner sequence + 3' sequence
tagggaagagaaggacatatgatggcattcgatgaacgaggcatgatgcgtcattgactagtacatgaccacttga

SEQ ID NO: 51572 - DNA, 76 bp, Artificial Sequence; identical to SEQ ID NO: 7802
  Description of Artificial Sequence: Synthetic casein; 5' sequence + inner sequence + 3' sequence

SEQ ID NO: 51573 - DNA, 76 bp, Artificial Sequence; identical to SEQ ID NO: 31563
  Description of Artificial Sequence: Synthetic casein; 5' sequence + inner sequence + 3' sequence

SEQ ID NO: 51574 - DNA, 76 bp, Artificial Sequence; identical to SEQ ID NO: 3034
  Description of Artificial Sequence: Synthetic casein; 5' sequence + inner sequence + 3' sequence

SEQ ID NO: 51575 - DNA, 76 bp, Artificial Sequence; identical to SEQ ID NO: 3521
  Description of Artificial Sequence: Synthetic casein; 5' sequence + inner sequence + 3' sequence

SEQ ID NO: 51576 - DNA, 76 bp, Artificial Sequence; identical to SEQ ID NO: 31979
  Description of Artificial Sequence: Synthetic casein; 5' sequence + inner sequence + 3' sequence

SEQ ID NO: 51577 - DNA, 76 bp, Artificial Sequence; identical to SEQ ID NO: 3551
  Description of Artificial Sequence: Synthetic casein; 5' sequence + inner sequence + 3' sequence

SEQ ID NO: 51578 - DNA, 76 bp, Artificial Sequence; identical to SEQ ID NO: 47674
  Description of Artificial Sequence: Synthetic casein; 5' sequence + inner sequence + 3' sequence

SEQ ID NO: 51579 - DNA, 76 bp, Artificial Sequence; identical to SEQ ID NO: 47972
  Description of Artificial Sequence: Synthetic casein; 5' sequence + inner sequence + 3' sequence

SEQ ID NO: 51580 - DNA, 76 bp, Artificial Sequence; identical to SEQ ID NO: 39797
  Description of Artificial Sequence: Synthetic casein; 5' sequence + inner sequence + 3' sequence

SEQ ID NO: 51581 - DNA, 76 bp, Artificial Sequence; identical to SEQ ID NO: 47555
  Description of Artificial Sequence: Synthetic casein; 5' sequence + inner sequence + 3' sequence

SEQ ID NO: 51582 - DNA, 76 bp, Artificial Sequence; identical to SEQ ID NO: 47596
  Description of Artificial Sequence: Synthetic casein; 5' sequence + inner sequence + 3' sequence

SEQ ID NO: 51583 - DNA, 76 bp, Artificial Sequence; identical to SEQ ID NO: 7882
  Description of Artificial Sequence: Synthetic casein; 5' sequence + inner sequence + 3' sequence

SEQ ID NO: 51584 - DNA, 76 bp, Artificial Sequence; identical to SEQ ID NO: 15958
  Description of Artificial Sequence: Synthetic casein; 5' sequence + inner sequence + 3' sequence

SEQ ID NO: 51585 - DNA, 76 bp, Artificial Sequence; identical to SEQ ID NO: 3065
  Description of Artificial Sequence: Synthetic casein; 5' sequence + inner sequence + 3' sequence

SEQ ID NO: 51586 - DNA, 76 bp, Artificial Sequence; identical to SEQ ID NO: 47549
  Description of Artificial Sequence: Synthetic casein; 5' sequence + inner sequence + 3' sequence

SEQ ID NO: 51587 - DNA, 76 bp, Artificial Sequence
  Description of Artificial Sequence: Synthetic casein; 5' sequence + inner sequence + 3' sequence
tagggaagagaaggacatatgatgcatcgcatgcgtcacgtcctcaccgtgccttgactagtacatgaccacttga

SEQ ID NO: 51588 - DNA, 76 bp, Artificial Sequence; identical to SEQ ID NO: 3057
  Description of Artificial Sequence: Synthetic casein; 5' sequence + inner sequence + 3' sequence

SEQ ID NO: 51589 - DNA, 76 bp, Artificial Sequence; identical to SEQ ID NO: 47843
  Description of Artificial Sequence: Synthetic casein; 5' sequence + inner sequence + 3' sequence

SEQ ID NO: 51590 - DNA, 76 bp, Artificial Sequence; identical to SEQ ID NO: 47662
  Description of Artificial Sequence: Synthetic casein; 5' sequence + inner sequence + 3' sequence

SEQ ID NO: 51591 - DNA, 76 bp, Artificial Sequence; identical to SEQ ID NO: 31705
  Description of Artificial Sequence: Synthetic casein; 5' sequence + inner sequence + 3' sequence

SEQ ID NO: 51592 - DNA, 76 bp, Artificial Sequence; identical to SEQ ID NO: 7272
  Description of Artificial Sequence: Synthetic casein; 5' sequence + inner sequence + 3' sequence

SEQ ID NO: 51593 - DNA, 76 bp, Artificial Sequence
  Description of Artificial Sequence: Synthetic casein; 5' sequence + inner sequence + 3' sequence
tagggaagagaaggacatatgatgcgtacacgtcacacgcatgccacgtcacgttgactagtacatgaccacttga

SEQ ID NO: 51594 - DNA, 76 bp, Artificial Sequence; identical to SEQ ID NO: 23666
  Description of Artificial Sequence: Synthetic casein; 5' sequence + inner sequence + 3' sequence

SEQ ID NO: 51595 - DNA, 76 bp, Artificial Sequence; identical to SEQ ID NO: 47939
  Description of Artificial Sequence: Synthetic casein; 5' sequence + inner sequence + 3' sequence

SEQ ID NO: 51596 - DNA, 76 bp, Artificial Sequence
  Description of Artificial Sequence: Synthetic casein; 5' sequence + inner sequence + 3' sequence
tagggaagagaaggacatatgatgcgtgatggcgtaacgtccgacactgcacattgactagtacatgaccacttga

SEQ ID NO: 51597 - DNA, 76 bp, Artificial Sequence
  Description of Artificial Sequence: Synthetic casein; 5' sequence + inner sequence + 3' sequence
tagggaagagaaggacatatgatgcgtacggcacgacgatgatgcactacgtgttgactagtacatgaccacttga

SEQ ID NO: 51598 - DNA, 76 bp, Artificial Sequence; identical to SEQ ID NO: 3331
  Description of Artificial Sequence: Synthetic casein; 5' sequence + inner sequence + 3' sequence

SEQ ID NO: 51599 - DNA, 76 bp, Artificial Sequence; identical to SEQ ID NO: 47620
  Description of Artificial Sequence: Synthetic casein; 5' sequence + inner sequence + 3' sequence

SEQ ID NO: 51600 - DNA, 76 bp, Artificial Sequence; identical to SEQ ID NO: 15892
  Description of Artificial Sequence: Synthetic casein; 5' sequence + inner sequence + 3' sequence

SEQ ID NO: 51601 - DNA, 76 bp, Artificial Sequence; identical to SEQ ID NO: 23661
  Description of Artificial Sequence: Synthetic casein; 5' sequence + inner sequence + 3' sequence

SEQ ID NO: 51602 - DNA, 76 bp, Artificial Sequence; identical to SEQ ID NO: 3452
  Description of Artificial Sequence: Synthetic casein; 5' sequence + inner sequence + 3' sequence

SEQ ID NO: 51603 - DNA, 76 bp, Artificial Sequence; identical to SEQ ID NO: 3406
  Description of Artificial Sequence: Synthetic casein; 5' sequence + inner sequence + 3' sequence

SEQ ID NO: 51604 - DNA, 71 bp, Artificial Sequence; identical to SEQ ID NO: 23136
  Description of Artificial Sequence: Synthetic casein; 5' sequence + inner sequence + 3' sequence

SEQ ID NO: 51605 - DNA, 76 bp, Artificial Sequence; identical to SEQ ID NO: 47552
  Description of Artificial Sequence: Synthetic casein; 5' sequence + inner sequence + 3' sequence

SEQ ID NO: 51606 - DNA, 76 bp, Artificial Sequence; identical to SEQ ID NO: 47668
  Description of Artificial Sequence: Synthetic casein; 5' sequence + inner sequence + 3' sequence

SEQ ID NO: 51607 - DNA, 76 bp, Artificial Sequence; identical to SEQ ID NO: 31737
  Description of Artificial Sequence: Synthetic casein; 5' sequence + inner sequence + 3' sequence

SEQ ID NO: 51608 - DNA, 76 bp, Artificial Sequence
  Description of Artificial Sequence: Synthetic casein; 5' sequence + inner sequence + 3' sequence
tagggaagagaaggacatatgatcaacgcaacgcatggtgacgtattgccgtgttgactagtacatgaccacttga

SEQ ID NO: 51609 - DNA, 76 bp, Artificial Sequence; identical to SEQ ID NO: 35193
  Description of Artificial Sequence: Synthetic casein; 5' sequence + inner sequence + 3' sequence

SEQ ID NO: 51610 - DNA, 76 bp, Artificial Sequence; identical to SEQ ID NO: 19605
  Description of Artificial Sequence: Synthetic casein; 5' sequence + inner sequence + 3' sequence

SEQ ID NO: 51611 - DNA, 76 bp, Artificial Sequence; identical to SEQ ID NO: 47768
  Description of Artificial Sequence: Synthetic casein; 5' sequence + inner sequence + 3' sequence

SEQ ID NO: 51612 - DNA, 76 bp, Artificial Sequence
  Description of Artificial Sequence: Synthetic casein; 5' sequence + inner sequence + 3' sequence
tagggaagagaaggacatatgatgtcatgcacgcaccctatcatgtaggcatgttgactagtacatgaccacttga

SEQ ID NO: 51613 - DNA, 76 bp, Artificial Sequence
  Description of Artificial Sequence: Synthetic casein; 5' sequence + inner sequence + 3' sequence
tagggaagagaaggacatatgatcgaacgcacactgcacgccactacgtcacgttgactagtacatgaccacttga

SEQ ID NO: 51614 - DNA, 76 bp, Artificial Sequence; identical to SEQ ID NO: 3477
  Description of Artificial Sequence: Synthetic casein; 5' sequence + inner sequence + 3' sequence

SEQ ID NO: 51615 - DNA, 76 bp, Artificial Sequence; identical to SEQ ID NO: 47711
  Description of Artificial Sequence: Synthetic casein; 5' sequence + inner sequence + 3' sequence

SEQ ID NO: 51616 - DNA, 74 bp, Artificial Sequence
  Description of Artificial Sequence: Synthetic casein; 5' sequence + inner sequence + 3' sequence
tagggaagagaaggacatatgatggacgcaacgcaccgtatcgtggccatgttgactagtacatgaccacttga

SEQ ID NO: 51617 - DNA, 76 bp, Artificial Sequence; identical to SEQ ID NO: 23515
  Description of Artificial Sequence: Synthetic casein; 5' sequence + inner sequence + 3' sequence

SEQ ID NO: 51618 - DNA, 76 bp, Artificial Sequence; identical to SEQ ID NO: 31791
  Description of Artificial Sequence: Synthetic casein; 5' sequence + inner sequence + 3' sequence

SEQ ID NO: 51619 - DNA, 76 bp, Artificial Sequence; identical to SEQ ID NO: 23286
  Description of Artificial Sequence: Synthetic casein; 5' sequence + inner sequence + 3' sequence

SEQ ID NO: 51620 - DNA, 76 bp, Artificial Sequence; identical to SEQ ID NO: 3132
  Description of Artificial Sequence: Synthetic casein; 5' sequence + inner sequence + 3' sequence

SEQ ID NO: 51621 - DNA, 76 bp, Artificial Sequence; identical to SEQ ID NO: 23982
  Description of Artificial Sequence: Synthetic casein; 5' sequence + inner sequence + 3' sequence

SEQ ID NO: 51622 - DNA, 76 bp, Artificial Sequence
  Description of Artificial Sequence: Synthetic casein; 5' sequence + inner sequence + 3' sequence
tagggaagagaaggacatatgatcgtaccgcaggcatacgtgacgtcaacgcattgactagtacatgaccacttga

SEQ ID NO: 51623 - DNA, 76 bp, Artificial Sequence; identical to SEQ ID NO: 11798
  Description of Artificial Sequence: Synthetic casein; 5' sequence + inner sequence + 3' sequence

SEQ ID NO: 51624 - DNA, 76 bp, Artificial Sequence; identical to SEQ ID NO: 23793
  Description of Artificial Sequence: Synthetic casein; 5' sequence + inner sequence + 3' sequence

SEQ ID NO: 51625 - DNA, 76 bp, Artificial Sequence; identical to SEQ ID NO: 3324
  Description of Artificial Sequence: Synthetic casein; 5' sequence + inner sequence + 3' sequence

SEQ ID NO: 51626 - DNA, 76 bp, Artificial Sequence; identical to SEQ ID NO: 47903
  Description of Artificial Sequence: Synthetic casein; 5' sequence + inner sequence + 3' sequence

SEQ ID NO: 51627 - DNA, 76 bp, Artificial Sequence; identical to SEQ ID NO: 23576
  Description of Artificial Sequence: Synthetic casein; 5' sequence + inner sequence + 3' sequence

SEQ ID NO: 51628 - DNA, 76 bp, Artificial Sequence; identical to SEQ ID NO: 47249
  Description of Artificial Sequence: Synthetic casein; 5' sequence + inner sequence + 3' sequence

SEQ ID NO: 51629 - DNA, 76 bp, Artificial Sequence; identical to SEQ ID NO: 19744
  Description of Artificial Sequence: Synthetic casein; 5' sequence + inner sequence + 3' sequence

SEQ ID NO: 51630 - DNA, 76 bp, Artificial Sequence
  Description of Artificial Sequence: Synthetic casein; 5' sequence + inner sequence + 3' sequence
tagggaagagaaggacatatgatgtcgcgatgaccgtcagtacgcacgtcagcttgactagtacatgaccacttga

SEQ ID NO: 51631 - DNA, 76 bp, Artificial Sequence; identical to SEQ ID NO: 3171
  Description of Artificial Sequence: Synthetic casein; 5' sequence + inner sequence + 3' sequence

SEQ ID NO: 51632 - DNA, 76 bp, Artificial Sequence; identical to SEQ ID NO: 31307
  Description of Artificial Sequence: Synthetic casein; 5' sequence + inner sequence + 3' sequence

SEQ ID NO: 51633 - DNA, 76 bp, Artificial Sequence; identical to SEQ ID NO: 31844
  Description of Artificial Sequence: Synthetic casein; 5' sequence + inner sequence + 3' sequence

SEQ ID NO: 51634 - DNA, 76 bp, Artificial Sequence; identical to SEQ ID NO: 15985
  Description of Artificial Sequence: Synthetic casein; 5' sequence + inner sequence + 3' sequence

SEQ ID NO: 51635 - DNA, 76 bp, Artificial Sequence; identical to SEQ ID NO: 31704
  Description of Artificial Sequence: Synthetic casein; 5' sequence + inner sequence + 3' sequence

SEQ ID NO: 51636 - DNA, 76 bp, Artificial Sequence; identical to SEQ ID NO: 15922
  Description of Artificial Sequence: Synthetic casein; 5' sequence + inner sequence + 3' sequence

SEQ ID NO: 51637 - DNA, 76 bp, Artificial Sequence; identical to SEQ ID NO: 8001
  Description of Artificial Sequence: Synthetic casein; 5' sequence + inner sequence + 3' sequence

SEQ ID NO: 51638 - DNA, 76 bp, Artificial Sequence; identical to SEQ ID NO: 23692
  Description of Artificial Sequence: Synthetic casein; 5' sequence + inner sequence + 3' sequence

SEQ ID NO: 51639 - DNA, 76 bp, Artificial Sequence; identical to SEQ ID NO: 23797
  Description of Artificial Sequence: Synthetic casein; 5' sequence + inner sequence + 3' sequence

SEQ ID NO: 51640 - DNA, 76 bp, Artificial Sequence; identical to SEQ ID NO: 3697
  Description of Artificial Sequence: Synthetic casein; 5' sequence + inner sequence + 3' sequence

SEQ ID NO: 51641 - DNA, 78 bp, Artificial Sequence
  Description of Artificial Sequence: Synthetic casein; 5' sequence + inner sequence + 3' sequence
tagggaagagaaggacatatgatgcacgactcgcaccctatcatgaggccatgtgttgactagtacatgaccacttga

SEQ ID NO: 51642 - DNA, 76 bp, Artificial Sequence; identical to SEQ ID NO: 7469
  Description of Artificial Sequence: Synthetic casein; 5' sequence + inner sequence + 3' sequence

SEQ ID NO: 51643 - DNA, 76 bp, Artificial Sequence; identical to SEQ ID NO: 47602
  Description of Artificial Sequence: Synthetic casein; 5' sequence + inner sequence + 3' sequence

SEQ ID NO: 51644 - DNA, 76 bp, Artificial Sequence; identical to SEQ ID NO: 7694
  Description of Artificial Sequence: Synthetic casein; 5' sequence + inner sequence + 3' sequence

SEQ ID NO: 51645 - DNA, 74 bp, Artificial Sequence
  Description of Artificial Sequence: Synthetic casein; 5' sequence + inner sequence + 3' sequence
tagggaagagaaggacatatgatgtacgcaacgtaccgtatcgtggccatgttgactagtacatgaccacttga

SEQ ID NO: 51646 - DNA, 76 bp, Artificial Sequence; identical to SEQ ID NO: 47991
  Description of Artificial Sequence: Synthetic casein; 5' sequence + inner sequence + 3' sequence

SEQ ID NO: 51647 - DNA, 76 bp, Artificial Sequence; identical to SEQ ID NO: 23307
  Description of Artificial Sequence: Synthetic casein; 5' sequence + inner sequence + 3' sequence

SEQ ID NO: 51648 - DNA, 76 bp, Artificial Sequence; identical to SEQ ID NO: 47937
  Description of Artificial Sequence: Synthetic casein; 5' sequence + inner sequence + 3' sequence

SEQ ID NO: 51649 - DNA, 76 bp, Artificial Sequence
  Description of Artificial Sequence: Synthetic casein; 5' sequence + inner sequence + 3' sequence
tagggaagagaaggacatatgatcggtgtgacggcatcgtgacgtactgcgcattgactagtacatgaccacttga

SEQ ID NO: 51650 - DNA, 75 bp, Artificial Sequence; identical to SEQ ID NO: 3975
  Description of Artificial Sequence: Synthetic casein; 5' sequence + inner sequence + 3' sequence

SEQ ID NO: 51651 - DNA, 76 bp, Artificial Sequence; identical to SEQ ID NO: 47924
  Description of Artificial Sequence: Synthetic casein; 5' sequence + inner sequence + 3' sequence

SEQ ID NO: 51652 - DNA, 76 bp, Artificial Sequence; identical to SEQ ID NO: 23773
  Description of Artificial Sequence: Synthetic casein; 5' sequence + inner sequence + 3' sequence

SEQ ID NO: 51653 - DNA, 76 bp, Artificial Sequence; identical to SEQ ID NO: 3100
  Description of Artificial Sequence: Synthetic casein; 5' sequence + inner sequence + 3' sequence

SEQ ID NO: 51654 - DNA, 76 bp, Artificial Sequence; identical to SEQ ID NO: 23372
  Description of Artificial Sequence: Synthetic casein; 5' sequence + inner sequence + 3' sequence

SEQ ID NO: 51655 - DNA, 76 bp, Artificial Sequence; identical to SEQ ID NO: 32000
  Description of Artificial Sequence: Synthetic casein; 5' sequence + inner sequence + 3' sequence

SEQ ID NO: 51656 - DNA, 76 bp, Artificial Sequence
  Description of Artificial Sequence: Synthetic casein; 5' sequence + inner sequence + 3' sequence
tagggaagagaaggacatatgatgcgatgggacgttacgtacggtacgccacattgactagtacatgaccacttga

SEQ ID NO: 51657 - DNA, 76 bp, Artificial Sequence; identical to SEQ ID NO: 19950
  Description of Artificial Sequence: Synthetic casein; 5' sequence + inner sequence + 3' sequence

SEQ ID NO: 51658 - DNA, 76 bp, Artificial Sequence; identical to SEQ ID NO: 35190
  Description of Artificial Sequence: Synthetic casein; 5' sequence + inner sequence + 3' sequence

SEQ ID NO: 51659 - DNA, 76 bp, Artificial Sequence; identical to SEQ ID NO: 31846
  Description of Artificial Sequence: Synthetic casein; 5' sequence + inner sequence + 3' sequence

SEQ ID NO: 51660 - DNA, 74 bp, Artificial Sequence
  Description of Artificial Sequence: Synthetic casein; 5' sequence + inner sequence + 3' sequence
tagggaagagaaggacatatgatggacgcaacgtgtgcaatgttgtacgcattgactagtacatgaccacttga

SEQ ID NO: 51661 - DNA, 76 bp, Artificial Sequence; identical to SEQ ID NO: 3096
  Description of Artificial Sequence: Synthetic casein; 5' sequence + inner sequence + 3' sequence

SEQ ID NO: 51662 - DNA, 76 bp, Artificial Sequence
  Description of Artificial Sequence: Synthetic casein; 5' sequence + inner sequence + 3' sequence
tagggaagagaaggacatatgatgacgacaacgtaccgccatgttacgtcacgttgactagtacatgaccacttga

SEQ ID NO: 51663 - DNA, 76 bp, Artificial Sequence; identical to SEQ ID NO: 47544
  Description of Artificial Sequence: Synthetic casein; 5' sequence + inner sequence + 3' sequence

SEQ ID NO: 51664 - DNA, 76 bp, Artificial Sequence; identical to SEQ ID NO: 47499
  Description of Artificial Sequence: Synthetic casein; 5' sequence + inner sequence + 3' sequence

SEQ ID NO: 51665 - DNA, 76 bp, Artificial Sequence
  Description of Artificial Sequence: Synthetic casein; 5' sequence + inner sequence + 3' sequence
tagggaagagaaggacatatgatggacgcaacgcaacgatacgtgcttacgtgttgactagtacatgaccacttga

SEQ ID NO: 51666 - DNA, 76 bp, Artificial Sequence; identical to SEQ ID NO: 3332
  Description of Artificial Sequence: Synthetic casein; 5' sequence + inner sequence + 3' sequence

SEQ ID NO: 51667 - DNA, 75 bp, Artificial Sequence; identical to SEQ ID NO: 7559
  Description of Artificial Sequence: Synthetic casein; 5' sequence + inner sequence + 3' sequence

SEQ ID NO: 51668 - DNA, 76 bp, Artificial Sequence; identical to SEQ ID NO: 23668
  Description of Artificial Sequence: Synthetic casein; 5' sequence + inner sequence + 3' sequence

SEQ ID NO: 51669 - DNA, 76 bp, Artificial Sequence; identical to SEQ ID NO: 47917
  Description of Artificial Sequence: Synthetic casein; 5' sequence + inner sequence + 3' sequence

SEQ ID NO: 51670 - DNA, 76 bp, Artificial Sequence; identical to SEQ ID NO: 11868
  Description of Artificial Sequence: Synthetic casein; 5' sequence + inner sequence + 3' sequence

SEQ ID NO: 51671 - DNA, 76 bp, Artificial Sequence; identical to SEQ ID NO: 47926
  Description of Artificial Sequence: Synthetic casein; 5' sequence + inner sequence + 3' sequence

SEQ ID NO: 51672 - DNA, 76 bp, Artificial Sequence; identical to SEQ ID NO: 47379
  Description of Artificial Sequence: Synthetic casein; 5' sequence + inner sequence + 3' sequence

SEQ ID NO: 51673 - DNA, 76 bp, Artificial Sequence; identical to SEQ ID NO: 35074
  Description of Artificial Sequence: Synthetic casein; 5' sequence + inner sequence + 3' sequence

SEQ ID NO: 51674 - DNA, 76 bp, Artificial Sequence; identical to SEQ ID NO: 47556
  Description of Artificial Sequence: Synthetic casein; 5' sequence + inner sequence + 3' sequence

SEQ ID NO: 51675 - DNA, 76 bp, Artificial Sequence; identical to SEQ ID NO: 3603
  Description of Artificial Sequence: Synthetic casein; 5' sequence + inner sequence + 3' sequence

SEQ ID NO: 51676 - DNA, 76 bp, Artificial Sequence
  Description of Artificial Sequence: Synthetic casein; 5' sequence + inner sequence + 3' sequence
tagggaagagaaggacatatgatgcgtaacggtacgtatccctgtcgtacgcattgactagtacatgaccacttga

SEQ ID NO: 51677 - DNA, 76 bp, Artificial Sequence
  Description of Artificial Sequence: Synthetic casein; 5' sequence + inner sequence + 3' sequence
tagggaagagaaggacatatgatgcgtacacgtgcatcgtcttcgcgcacacgttgactagtacatgaccacttga

SEQ ID NO: 51678 - DNA, 76 bp, Artificial Sequence; identical to SEQ ID NO: 47849
  Description of Artificial Sequence: Synthetic casein; 5' sequence + inner sequence + 3' sequence

SEQ ID NO: 51679 - DNA, 76 bp, Artificial Sequence; identical to SEQ ID NO: 47935
  Description of Artificial Sequence: Synthetic casein; 5' sequence + inner sequence + 3' sequence

SEQ ID NO: 51680 - DNA, 76 bp, Artificial Sequence; identical to SEQ ID NO: 3048
  Description of Artificial Sequence: Synthetic casein; 5' sequence + inner sequence + 3' sequence

SEQ ID NO: 51681 - DNA, 76 bp, Artificial Sequence
  Description of Artificial Sequence: Synthetic casein; 5' sequence + inner sequence + 3' sequence
tagggaagagaaggacatatgatcgcgtcagcacgtgatggtacgtacgcacattgactagtacatgaccacttga

SEQ ID NO: 51682 - DNA, 76 bp, Artificial Sequence; identical to SEQ ID NO: 19799
  Description of Artificial Sequence: Synthetic casein; 5' sequence + inner sequence + 3' sequence

SEQ ID NO: 51683 - DNA, 76 bp, Artificial Sequence
  Description of Artificial Sequence: Synthetic casein; 5' sequence + inner sequence + 3' sequence
tagggaagagaaggacatatgatcgtgtccacgcaacatgtgtacgttacgcattgactagtacatgaccacttga

SEQ ID NO: 51684 - DNA, 76 bp, Artificial Sequence
  Description of Artificial Sequence: Synthetic casein; 5' sequence + inner sequence + 3' sequence
tagggaagagaaggacatatgatggacgcaacgtaccgtatcttggccatgtgttgactagtacatgaccacttga

SEQ ID NO: 51685 - DNA, 76 bp, Artificial Sequence; identical to SEQ ID NO: 31672
  Description of Artificial Sequence: Synthetic casein; 5' sequence + inner sequence + 3' sequence

SEQ ID NO: 51686 - DNA, 76 bp, Artificial Sequence
  Description of Artificial Sequence: Synthetic casein; 5' sequence + inner sequence + 3' sequence
tagggaagagaaggacatatgatgcactgtgtgtcgtaccgtcctgctgcacgttgactagtacatgaccacttga

SEQ ID NO: 51687 - DNA, 76 bp, Artificial Sequence
  Description of Artificial Sequence: Synthetic casein; 5' sequence + inner sequence + 3' sequence
tagggaagagaaggacatatgatgacgtgacgcataccgtatgtacgttgtgcttgactagtacatgaccacttga

SEQ ID NO: 51688 - DNA, 76 bp, Artificial Sequence; identical to SEQ ID NO: 31818
  Description of Artificial Sequence: Synthetic casein; 5' sequence + inner sequence + 3' sequence

SEQ ID NO: 51689 - DNA, 76 bp, Artificial Sequence; identical to SEQ ID NO: 3486
  Description of Artificial Sequence: Synthetic casein; 5' sequence + inner sequence + 3' sequence

SEQ ID NO: 51690 - DNA, 76 bp, Artificial Sequence; identical to SEQ ID NO: 47947
  Description of Artificial Sequence: Synthetic casein; 5' sequence + inner sequence + 3' sequence

SEQ ID NO: 51691 - DNA, 76 bp, Artificial Sequence
  Description of Artificial Sequence: Synthetic casein; 5' sequence + inner sequence + 3' sequence
tagggaagagaaggacatatgatgacgtgccagcgtgacgtatggcatgcatcttgactagtacatgaccacttga

SEQ ID NO: 51692 - DNA, 76 bp, Artificial Sequence; identical to SEQ ID NO: 47677
  Description of Artificial Sequence: Synthetic casein; 5' sequence + inner sequence + 3' sequence

SEQ ID NO: 51693 - DNA, 76 bp, Artificial Sequence
  Description of Artificial Sequence: Synthetic casein; 5' sequence + inner sequence + 3' sequence
tagggaagagaaggacatatgatggacgcaacgtaccgtatcgtggtcacgtattgactagtacatgaccacttga

SEQ ID NO: 51694 - DNA, 76 bp, Artificial Sequence; identical to SEQ ID NO: 47898
  Description of Artificial Sequence: Synthetic casein; 5' sequence + inner sequence + 3' sequence

SEQ ID NO: 51695 - DNA, 76 bp, Artificial Sequence
  Description of Artificial Sequence: Synthetic casein; 5' sequence + inner sequence + 3' sequence
tagggaagagaaggacatatgatacgtcatgacgtactgcgcatcacgacacgttgactagtacatgaccacttga

SEQ ID NO: 51696 - DNA, 76 bp, Artificial Sequence
  Description of Artificial Sequence: Synthetic casein; 5' sequence + inner sequence + 3' sequence
tagggaagagaaggacatatgatgcacgactcgcaccctatcatgtcggcatgttgactagtacatgaccacttga

SEQ ID NO: 51697 - DNA, 76 bp, Artificial Sequence; identical to SEQ ID NO: 3788
  Description of Artificial Sequence: Synthetic casein; 5' sequence + inner sequence + 3' sequence

SEQ ID NO: 51698 - DNA, 76 bp, Artificial Sequence
  Description of Artificial Sequence: Synthetic casein; 5' sequence + inner sequence + 3' sequence
tagggaagagaaggacatatgatggacgcaaagtaccgtatcgtggccatgtgttgactagtacatgaccacttga

SEQ ID NO: 51699 - DNA, 76 bp, Artificial Sequence; identical to SEQ ID NO: 3294
  Description of Artificial Sequence: Synthetic casein; 5' sequence + inner sequence + 3' sequence

SEQ ID NO: 51700 - DNA, 76 bp, Artificial Sequence; identical to SEQ ID NO: 31677
  Description of Artificial Sequence: Synthetic casein; 5' sequence + inner sequence + 3' sequence

SEQ ID NO: 51701 - DNA, 76 bp, Artificial Sequence; identical to SEQ ID NO: 47726
  Description of Artificial Sequence: Synthetic casein; 5' sequence + inner sequence + 3' sequence

SEQ ID NO: 51702 - DNA, 76 bp, Artificial Sequence; identical to SEQ ID NO: 47610
  Description of Artificial Sequence: Synthetic casein; 5' sequence + inner sequence + 3' sequence

SEQ ID NO: 51703 - DNA, 76 bp, Artificial Sequence; identical to SEQ ID NO: 3543
  Description of Artificial Sequence: Synthetic casein; 5' sequence + inner sequence + 3' sequence

SEQ ID NO: 51704 - DNA, 75 bp, Artificial Sequence; identical to SEQ ID NO: 7763
  Description of Artificial Sequence: Synthetic casein; 5' sequence + inner sequence + 3' sequence

SEQ ID NO: 51705 - DNA, 76 bp, Artificial Sequence; identical to SEQ ID NO: 23367
  Description of Artificial Sequence: Synthetic casein; 5' sequence + inner sequence + 3' sequence

SEQ ID NO: 51706 - DNA, 76 bp, Artificial Sequence
  Description of Artificial Sequence: Synthetic casein; 5' sequence + inner sequence + 3' sequence
tagggaagagaaggacatatgatggacgcaacggaccgtatcgtggccatgtgttgactagtacatgaccacttga

SEQ ID NO: 51707 - DNA, 76 bp, Artificial Sequence; identical to SEQ ID NO: 47636
  Description of Artificial Sequence: Synthetic casein; 5' sequence + inner sequence + 3' sequence

SEQ ID NO: 51708 - DNA, 76 bp, Artificial Sequence; identical to SEQ ID NO: 15767
  Description of Artificial Sequence: Synthetic casein; 5' sequence + inner sequence + 3' sequence

SEQ ID NO: 51709 - DNA, 76 bp, Artificial Sequence
  Description of Artificial Sequence: Synthetic casein; 5' sequence + inner sequence + 3' sequence
tagggaagagaaggacatatgatgcaacgccacgtacacgtccttgcctcacgttgactagtacatgaccacttga

SEQ ID NO: 51710 - DNA, 76 bp, Artificial Sequence; identical to SEQ ID NO: 47745
  Description of Artificial Sequence: Synthetic casein; 5' sequence + inner sequence + 3' sequence

SEQ ID NO: 51711 - DNA, 76 bp, Artificial Sequence; identical to SEQ ID NO: 23923
  Description of Artificial Sequence: Synthetic casein; 5' sequence + inner sequence + 3' sequence

SEQ ID NO: 51712 - DNA, 76 bp, Artificial Sequence; identical to SEQ ID NO: 3285
  Description of Artificial Sequence: Synthetic casein; 5' sequence + inner sequence + 3' sequence

SEQ ID NO: 51713 - DNA, 76 bp, Artificial Sequence; identical to SEQ ID NO: 31884
  Description of Artificial Sequence: Synthetic casein; 5' sequence + inner sequence + 3' sequence

SEQ ID NO: 51714 - DNA, 76 bp, Artificial Sequence; identical to SEQ ID NO: 19770
  Description of Artificial Sequence: Synthetic casein; 5' sequence + inner sequence + 3' sequence

SEQ ID NO: 51715 - DNA, 76 bp, Artificial Sequence; identical to SEQ ID NO: 23669
  Description of Artificial Sequence: Synthetic casein; 5' sequence + inner sequence + 3' sequence

SEQ ID NO: 51716 - DNA, 76 bp, Artificial Sequence
  Description of Artificial Sequence: Synthetic casein; 5' sequence + inner sequence + 3' sequence
tagggaagagaaggacatatgatggccacagcgtacctcaacgtggacatgcattgactagtacatgaccacttga

SEQ ID NO: 51717 - DNA, 76 bp, Artificial Sequence; identical to SEQ ID NO: 47805
  Description of Artificial Sequence: Synthetic casein; 5' sequence + inner sequence + 3' sequence

SEQ ID NO: 51718 - DNA, 76 bp, Artificial Sequence
  Description of Artificial Sequence: Synthetic casein; 5' sequence + inner sequence + 3' sequence
tagggaagagaaggacatatgatcgatacgtacgtagcatgcgatgtgacgcattgactagtacatgaccacttga

SEQ ID NO: 51719 - DNA, 76 bp, Artificial Sequence; identical to SEQ ID NO: 23410
  Description of Artificial Sequence: Synthetic casein; 5' sequence + inner sequence + 3' sequence

SEQ ID NO: 51720 - DNA, 76 bp, Artificial Sequence
  Description of Artificial Sequence: Synthetic casein; 5' sequence + inner sequence + 3' sequence
tagggaagagaaggacatatgatgcattacgcagccatacgcctcgatgcacgttgactagtacatgaccacttga

SEQ ID NO: 51721 - DNA, 76 bp, Artificial Sequence; identical to SEQ ID NO: 47739
  Description of Artificial Sequence: Synthetic casein; 5' sequence + inner sequence + 3' sequence

SEQ ID NO: 51722 - DNA, 76 bp, Artificial Sequence; identical to SEQ ID NO: 47663
  Description of Artificial Sequence: Synthetic casein; 5' sequence + inner sequence + 3' sequence

SEQ ID NO: 51723 - DNA, 76 bp, Artificial Sequence; identical to SEQ ID NO: 47642
  Description of Artificial Sequence: Synthetic casein; 5' sequence + inner sequence + 3' sequence

SEQ ID NO: 51724 - DNA, 76 bp, Artificial Sequence
  Description of Artificial Sequence: Synthetic casein; 5' sequence + inner sequence + 3' sequence
tagggaagagaaggacatatgatgcaacacagcgttacgtacgacacgacaccttgactagtacatgaccacttga

SEQ ID NO: 51725 - DNA, 76 bp, Artificial Sequence; identical to SEQ ID NO: 47936
  Description of Artificial Sequence: Synthetic casein; 5' sequence + inner sequence + 3' sequence

SEQ ID NO: 51726 - DNA, 76 bp, Artificial Sequence
  Description of Artificial Sequence: Synthetic casein; 5' sequence + inner sequence + 3' sequence
tagggaagagaaggacatatgatgatgcgtacgtcacgtcgtagtgctgcgcgttgactagtacatgaccacttga

SEQ ID NO: 51727 - DNA, 76 bp, Artificial Sequence
  Description of Artificial Sequence: Synthetic casein; 5' sequence + inner sequence + 3' sequence
tagggaagagaaggacatatgatcgcgatgaggtgacgtgccttccgtacgcgttgactagtacatgaccacttga

SEQ ID NO: 51728 - DNA, 76 bp, Artificial Sequence; identical to SEQ ID NO: 23644
  Description of Artificial Sequence: Synthetic casein; 5' sequence + inner sequence + 3' sequence

SEQ ID NO: 51729 - DNA, 76 bp, Artificial Sequence
  Description of Artificial Sequence: Synthetic casein; 5' sequence + inner sequence + 3' sequence
tagggaagagaaggacatatgatacgtgtgccgcgcaacgtgatgtgtgcacattgactagtacatgaccacttga

SEQ ID NO: 51730 - DNA, 76 bp, Artificial Sequence; identical to SEQ ID NO: 23807
  Description of Artificial Sequence: Synthetic casein; 5' sequence + inner sequence + 3' sequence

SEQ ID NO: 51731 - DNA, 76 bp, Artificial Sequence; identical to SEQ ID NO: 15945
  Description of Artificial Sequence: Synthetic casein; 5' sequence + inner sequence + 3' sequence

SEQ ID NO: 51732 - DNA, 76 bp, Artificial Sequence; identical to SEQ ID NO: 47865
  Description of Artificial Sequence: Synthetic casein; 5' sequence + inner sequence + 3' sequence

SEQ ID NO: 51733 - DNA, 76 bp, Artificial Sequence; identical to SEQ ID NO: 47879
  Description of Artificial Sequence: Synthetic casein; 5' sequence + inner sequence + 3' sequence

SEQ ID NO: 51734 - DNA, 76 bp, Artificial Sequence; identical to SEQ ID NO: 3129
  Description of Artificial Sequence: Synthetic casein; 5' sequence + inner sequence + 3' sequence

SEQ ID NO: 51735 - DNA, 76 bp, Artificial Sequence; identical to SEQ ID NO: 47723
  Description of Artificial Sequence: Synthetic casein; 5' sequence + inner sequence + 3' sequence

SEQ ID NO: 51736 - DNA, 76 bp, Artificial Sequence; identical to SEQ ID NO: 3576
  Description of Artificial Sequence: Synthetic casein; 5' sequence + inner sequence + 3' sequence

SEQ ID NO: 51737 - DNA, 76 bp, Artificial Sequence
  Description of Artificial Sequence: Synthetic casein; 5' sequence + inner sequence + 3' sequence
tagggaagagaaggacatatgatgtcatgcacgaacactatcatggccgcatgttgactagtacatgaccacttga

SEQ ID NO: 51738 - DNA, 76 bp, Artificial Sequence; identical to SEQ ID NO: 23502
  Description of Artificial Sequence: Synthetic casein; 5' sequence + inner sequence + 3' sequence

SEQ ID NO: 51739 - DNA, 76 bp, Artificial Sequence
  Description of Artificial Sequence: Synthetic casein; 5' sequence + inner sequence + 3' sequence
tagggaagagaaggacatatgatcgatacgccatgatgtccgtgatctgcacgttgactagtacatgaccacttga

SEQ ID NO: 51740 - DNA, 76 bp, Artificial Sequence; identical to SEQ ID NO: 3789
  Description of Artificial Sequence: Synthetic casein; 5' sequence + inner sequence + 3' sequence

SEQ ID NO: 51741 - DNA, 75 bp, Artificial Sequence
  Description of Artificial Sequence: Synthetic casein; 5' sequence + inner sequence + 3' sequence
tagggaagagaaggacatatgatacgtgtgcggaacgtgtgtgccatacgcattgactagtacatgaccacttga

SEQ ID NO: 51742 - DNA, 74 bp, Artificial Sequence
  Description of Artificial Sequence: Synthetic casein; 5' sequence + inner sequence + 3' sequence
tagggaagagaaggacatatgatggacgcaacgtaccgcatcgtggccatgttgactagtacatgaccacttga

SEQ ID NO: 51743 - DNA, 76 bp, Artificial Sequence; identical to SEQ ID NO: 7918
  Description of Artificial Sequence: Synthetic casein; 5' sequence + inner sequence + 3' sequence

SEQ ID NO: 51744 - DNA, 76 bp, Artificial Sequence; identical to SEQ ID NO: 23820
  Description of Artificial Sequence: Synthetic casein; 5' sequence + inner sequence + 3' sequence

SEQ ID NO: 51745 - DNA, 76 bp, Artificial Sequence; identical to SEQ ID NO: 35619
  Description of Artificial Sequence: Synthetic casein; 5' sequence + inner sequence + 3' sequence

SEQ ID NO: 51746 - DNA, 76 bp, Artificial Sequence
  Description of Artificial Sequence: Synthetic casein; 5' sequence + inner sequence + 3' sequence
tagggaagagaaggacatatgatcgtatggcaggcacgtcacgtatgcgtggtttgactagtacatgaccacttga

SEQ ID NO: 51747 - DNA, 76 bp, Artificial Sequence; identical to SEQ ID NO: 31329
  Description of Artificial Sequence: Synthetic casein; 5' sequence + inner sequence + 3' sequence

SEQ ID NO: 51748 - DNA, 76 bp, Artificial Sequence; identical to SEQ ID NO: 47845
  Description of Artificial Sequence: Synthetic casein; 5' sequence + inner sequence + 3' sequence

SEQ ID NO: 51749 - DNA, 76 bp, Artificial Sequence; identical to SEQ ID NO: 3991
  Description of Artificial Sequence: Synthetic casein; 5' sequence + inner sequence + 3' sequence

SEQ ID NO: 51750 - DNA, 76 bp, Artificial Sequence; identical to SEQ ID NO: 3853
  Description of Artificial Sequence: Synthetic casein; 5' sequence + inner sequence + 3' sequence

SEQ ID NO: 51751 - DNA, 76 bp, Artificial Sequence; identical to SEQ ID NO: 23853
  Description of Artificial Sequence: Synthetic casein; 5' sequence + inner sequence + 3' sequence

SEQ ID NO: 51752 - DNA, 76 bp, Artificial Sequence
  Description of Artificial Sequence: Synthetic casein; 5' sequence + inner sequence + 3' sequence
tagggaagagaaggacatatgatacgtcacgtcacgtaggtatggctgacgcgttgactagtacatgaccacttga

SEQ ID NO: 51753 - DNA, 76 bp, Artificial Sequence; identical to SEQ ID NO: 3088
  Description of Artificial Sequence: Synthetic casein; 5' sequence + inner sequence + 3' sequence

SEQ ID NO: 51754 - DNA, 76 bp, Artificial Sequence; identical to SEQ ID NO: 19698
  Description of Artificial Sequence: Synthetic casein; 5' sequence + inner sequence + 3' sequence

SEQ ID NO: 51755 - DNA, 76 bp, Artificial Sequence; identical to SEQ ID NO: 3754
  Description of Artificial Sequence: Synthetic casein; 5' sequence + inner sequence + 3' sequence

SEQ ID NO: 51756 - DNA, 76 bp, Artificial Sequence; identical to SEQ ID NO: 47771
  Description of Artificial Sequence: Synthetic casein; 5' sequence + inner sequence + 3' sequence

SEQ ID NO: 51757 - DNA, 76 bp, Artificial Sequence
  Description of Artificial Sequence: Synthetic casein; 5' sequence + inner sequence + 3' sequence
tagggaagagaaggacatatgatcgtacgcacacggaccgcatgtaccgcatgttgactagtacatgaccacttga

SEQ ID NO: 51758 - DNA, 76 bp, Artificial Sequence; identical to SEQ ID NO: 3159
  Description of Artificial Sequence: Synthetic casein; 5' sequence + inner sequence + 3' sequence

SEQ ID NO: 51759 - DNA, 76 bp, Artificial Sequence; identical to SEQ ID NO: 35484
  Description of Artificial Sequence: Synthetic casein; 5' sequence + inner sequence + 3' sequence

SEQ ID NO: 51760 - DNA, 76 bp, Artificial Sequence; identical to SEQ ID NO: 47733
  Description of Artificial Sequence: Synthetic casein; 5' sequence + inner sequence + 3' sequence

SEQ ID NO: 51761 - DNA, 76 bp, Artificial Sequence; identical to SEQ ID NO: 23976
  Description of Artificial Sequence: Synthetic casein; 5' sequence + inner sequence + 3' sequence

SEQ ID NO: 51762 - DNA, 76 bp, Artificial Sequence; identical to SEQ ID NO: 11985
  Description of Artificial Sequence: Synthetic casein; 5' sequence + inner sequence + 3' sequence

SEQ ID NO: 51763 - DNA, 76 bp, Artificial Sequence; identical to SEQ ID NO: 47907
  Description of Artificial Sequence: Synthetic casein; 5' sequence + inner sequence + 3' sequence

SEQ ID NO: 51764 - DNA, 76 bp, Artificial Sequence
  Description of Artificial Sequence: Synthetic casein; 5' sequence + inner sequence + 3' sequence
tagggaagagaaggacatatgatcgacagcatggcgaggtacgcaacgtcacgttgactagtacatgaccacttga

SEQ ID NO: 51765 - DNA, 76 bp, Artificial Sequence; identical to SEQ ID NO: 3497
  Description of Artificial Sequence: Synthetic casein; 5' sequence + inner sequence + 3' sequence

SEQ ID NO: 51766 - DNA, 76 bp, Artificial Sequence; identical to SEQ ID NO: 3840
  Description of Artificial Sequence: Synthetic casein; 5' sequence + inner sequence + 3' sequence

SEQ ID NO: 51767 - DNA, 76 bp, Artificial Sequence
  Description of Artificial Sequence: Synthetic casein; 5' sequence + inner sequence + 3' sequence
tagggaagagaaggacatatgatgcgatgcgacaacgatgtccgtgctgtacgttgactagtacatgaccacttga

SEQ ID NO: 51768 - DNA, 76 bp, Artificial Sequence; identical to SEQ ID NO: 35084
  Description of Artificial Sequence: Synthetic casein; 5' sequence + inner sequence + 3' sequence

SEQ ID NO: 51769 - DNA, 76 bp, Artificial Sequence; identical to SEQ ID NO: 3512
  Description of Artificial Sequence: Synthetic casein; 5' sequence + inner sequence + 3' sequence

SEQ ID NO: 51770 - DNA, 76 bp, Artificial Sequence; identical to SEQ ID NO: 7517
  Description of Artificial Sequence: Synthetic casein; 5' sequence + inner sequence + 3' sequence

SEQ ID NO: 51771 - DNA, 76 bp, Artificial Sequence
  Description of Artificial Sequence: Synthetic casein; 5' sequence + inner sequence + 3' sequence
tagggaagagaaggacatatgattgcgttacgtacgcatgcctcgacgtcacgttgactagtacatgaccacttga

SEQ ID NO: 51772 - DNA, 76 bp, Artificial Sequence; identical to SEQ ID NO: 47782
  Description of Artificial Sequence: Synthetic casein; 5' sequence + inner sequence + 3' sequence

SEQ ID NO: 51773 - DNA, 76 bp, Artificial Sequence
  Description of Artificial Sequence: Synthetic casein; 5' sequence + inner sequence + 3' sequence
tagggaagagaaggacatatgatgcgatacgcgatcacaccttccgttgcacgttgactagtacatgaccacttga

SEQ ID NO: 51774 - DNA, 76 bp, Artificial Sequence
  Description of Artificial Sequence: Synthetic casein; 5' sequence + inner sequence + 3' sequence
tagggaagagaaggacatatgatacgtgcacagcatgcgttcgatccgtcacgttgactagtacatgaccacttga

SEQ ID NO: 51775 - DNA, 76 bp, Artificial Sequence; identical to SEQ ID NO: 35136
  Description of Artificial Sequence: Synthetic casein; 5' sequence + inner sequence + 3' sequence

SEQ ID NO: 51776 - DNA, 76 bp, Artificial Sequence
  Description of Artificial Sequence: Synthetic casein; 5' sequence + inner sequence + 3' sequence
tagggaagagaaggacatatgatgcatgaggacgtgacggaacggtgtgcgtgttgactagtacatgaccacttga

SEQ ID NO: 51777 - DNA, 76 bp, Artificial Sequence
  Description of Artificial Sequence: Synthetic casein; 5' sequence + inner sequence + 3' sequence
tagggaagagaaggacatatgatgtcatgcacgatcactatcatggcggcatgttgactagtacatgaccacttga

SEQ ID NO: 51778 - DNA, 76 bp, Artificial Sequence; identical to SEQ ID NO: 3920
  Description of Artificial Sequence: Synthetic casein; 5' sequence + inner sequence + 3' sequence

SEQ ID NO: 51779 - DNA, 76 bp, Artificial Sequence; identical to SEQ ID NO: 3685
  Description of Artificial Sequence: Synthetic casein; 5' sequence + inner sequence + 3' sequence

SEQ ID NO: 51780 - DNA, 76 bp, Artificial Sequence
  Description of Artificial Sequence: Synthetic casein; 5' sequence + inner sequence + 3' sequence
tagggaagagaaggacatatgatggcatgcgatgtacgaggcatgatgcgtcattgactagtacatgaccacttga

SEQ ID NO: 51781 - DNA, 76 bp, Artificial Sequence
  Description of Artificial Sequence: Synthetic casein; 5' sequence + inner sequence + 3' sequence
tagggaagagaaggacatatgatcacgtaccagcgcatgtccgacacgtcacgttgactagtacatgaccacttga

SEQ ID NO: 51782 - DNA, 76 bp, Artificial Sequence
  Description of Artificial Sequence: Synthetic casein; 5' sequence + inner sequence + 3' sequence
tagggaagagaaggacatatgatcgtgtggcacgacaacacgttccgtccacgttgactagtacatgaccacttga

SEQ ID NO: 51783 - DNA, 76 bp, Artificial Sequence
  Description of Artificial Sequence: Synthetic casein; 5' sequence + inner sequence + 3' sequence
tagggaagagaaggacatatgatgccctgcacgcaccctatcatgtaggcatgttgactagtacatgaccacttga

SEQ ID NO: 51784 - DNA, 76 bp, Artificial Sequence
  Description of Artificial Sequence: Synthetic casein; 5' sequence + inner sequence + 3' sequence
tagggaagagaaggacatatgatgcacgtacggacgatgcgtgtgccttcgcattgactagtacatgaccacttga

SEQ ID NO: 51785 - DNA, 76 bp, Artificial Sequence; identical to SEQ ID NO: 47820
  Description of Artificial Sequence: Synthetic casein; 5' sequence + inner sequence + 3' sequence

SEQ ID NO: 51786 - DNA, 76 bp, Artificial Sequence
  Description of Artificial Sequence: Synthetic casein; 5' sequence + inner sequence + 3' sequence
tagggaagagaaggacatatgatgcacgactcgcaccctatcatgtagccatgttgactagtacatgaccacttga

SEQ ID NO: 51787 - DNA, 76 bp, Artificial Sequence
  Description of Artificial Sequence: Synthetic casein; 5' sequence + inner sequence + 3' sequence
tagggaagagaaggacatatgatagcgtgcatgctcacgtgacgtactgcgtgttgactagtacatgaccacttga

SEQ ID NO: 51788 - DNA, 76 bp, Artificial Sequence; identical to SEQ ID NO: 47637
  Description of Artificial Sequence: Synthetic casein; 5' sequence + inner sequence + 3' sequence

SEQ ID NO: 51789 - DNA, 76 bp, Artificial Sequence; identical to SEQ ID NO: 3580
  Description of Artificial Sequence: Synthetic casein; 5' sequence + inner sequence + 3' sequence

SEQ ID NO: 51790 - DNA, 76 bp, Artificial Sequence; identical to SEQ ID NO: 7617
  Description of Artificial Sequence: Synthetic casein; 5' sequence + inner sequence + 3' sequence

SEQ ID NO: 51791 - DNA, 76 bp, Artificial Sequence
  Description of Artificial Sequence: Synthetic casein; 5' sequence + inner sequence + 3' sequence
tagggaagagaaggacatatgatacgtcacgttgcatcgtagctgtgtccgccttgactagtacatgaccacttga

SEQ ID NO: 51792 - DNA, 76 bp, Artificial Sequence; identical to SEQ ID NO: 47609
  Description of Artificial Sequence: Synthetic casein; 5' sequence + inner sequence + 3' sequence

SEQ ID NO: 51793 - DNA, 76 bp, Artificial Sequence; identical to SEQ ID NO: 23899
  Description of Artificial Sequence: Synthetic casein; 5' sequence + inner sequence + 3' sequence

SEQ ID NO: 51794 - DNA, 76 bp, Artificial Sequence; identical to SEQ ID NO: 47599
  Description of Artificial Sequence: Synthetic casein; 5' sequence + inner sequence + 3' sequence

SEQ ID NO: 51795 - DNA, 76 bp, Artificial Sequence; identical to SEQ ID NO: 3498
  Description of Artificial Sequence: Synthetic casein; 5' sequence + inner sequence + 3' sequence

SEQ ID NO: 51796 - DNA, 76 bp, Artificial Sequence
  Description of Artificial Sequence: Synthetic casein; 5' sequence + inner sequence + 3' sequence
tagggaagagaaggacatatgatcgtgacgtgcgtgcagttacgtgtgccacgttgactagtacatgaccacttga

SEQ ID NO: 51797 - DNA, 76 bp, Artificial Sequence; identical to SEQ ID NO: 19726
  Description of Artificial Sequence: Synthetic casein; 5' sequence + inner sequence + 3' sequence

SEQ ID NO: 51798 - DNA, 76 bp, Artificial Sequence
  Description of Artificial Sequence: Synthetic casein; 5' sequence + inner sequence + 3' sequence
tagggaagagaaggacatatgatggtacgcatcgaccacgcaacacgtgcgcattgactagtacatgaccacttga

SEQ ID NO: 51799 - DNA, 76 bp, Artificial Sequence; identical to SEQ ID NO: 19412
  Description of Artificial Sequence: Synthetic casein; 5' sequence + inner sequence + 3' sequence

SEQ ID NO: 51800 - DNA, 76 bp, Artificial Sequence; identical to SEQ ID NO: 31836
  Description of Artificial Sequence: Synthetic casein; 5' sequence + inner sequence + 3' sequence

SEQ ID NO: 51801 - DNA, 76 bp, Artificial Sequence; identical to SEQ ID NO: 47834
  Description of Artificial Sequence: Synthetic casein; 5' sequence + inner sequence + 3' sequence

SEQ ID NO: 51802 - DNA, 76 bp, Artificial Sequence
  Description of Artificial Sequence: Synthetic casein; 5' sequence + inner sequence + 3' sequence
tagggaagagaaggacatatgatcgtaccgcacgcagtcgataggcatgcacattgactagtacatgaccacttga

SEQ ID NO: 51803 - DNA, 76 bp, Artificial Sequence; identical to SEQ ID NO: 23533
  Description of Artificial Sequence: Synthetic casein; 5' sequence + inner sequence + 3' sequence

SEQ ID NO: 51804 - DNA, 76 bp, Artificial Sequence
  Description of Artificial Sequence: Synthetic casein; 5' sequence + inner sequence + 3' sequence
tagggaagagaaggacatatgatacgtgtacgtagcatgtcgcgatctgcacgttgactagtacatgaccacttga

SEQ ID NO: 51805 - DNA, 76 bp, Artificial Sequence; identical to SEQ ID NO: 3923
  Description of Artificial Sequence: Synthetic casein; 5' sequence + inner sequence + 3' sequence

SEQ ID NO: 51806 - DNA, 76 bp, Artificial Sequence; identical to SEQ ID NO: 3717
  Description of Artificial Sequence: Synthetic casein; 5' sequence + inner sequence + 3' sequence

SEQ ID NO: 51807 - DNA, 76 bp, Artificial Sequence; identical to SEQ ID NO: 35622
  Description of Artificial Sequence: Synthetic casein; 5' sequence + inner sequence + 3' sequence

SEQ ID NO: 51808 - DNA, 76 bp, Artificial Sequence; identical to SEQ ID NO: 48001
  Description of Artificial Sequence: Synthetic casein; 5' sequence + inner sequence + 3' sequence

SEQ ID NO: 51809 - DNA, 76 bp, Artificial Sequence; identical to SEQ ID NO: 47487
  Description of Artificial Sequence: Synthetic casein; 5' sequence + inner sequence + 3' sequence

SEQ ID NO: 51810 - DNA, 76 bp, Artificial Sequence
  Description of Artificial Sequence: Synthetic casein; 5' sequence + inner sequence + 3' sequence
tagggaagagaaggacatatgatgacgtgacgcgatcggtacgtgacgttgcgttgactagtacatgaccacttga

SEQ ID NO: 51811 - DNA, 76 bp, Artificial Sequence
  Description of Artificial Sequence: Synthetic casein; 5' sequence + inner sequence + 3' sequence
tagggaagagaaggacatatgatggacgcaccgtaccgtatcgtggccatgtattgactagtacatgaccacttga

SEQ ID NO: 51812 - DNA, 76 bp, Artificial Sequence
  Description of Artificial Sequence: Synthetic casein; 5' sequence + inner sequence + 3' sequence
tagggaagagaaggacatatgatgcacgtgcacatgcctcgtttcgcgtcacgttgactagtacatgaccacttga

SEQ ID NO: 51813 - DNA, 76 bp, Artificial Sequence
  Description of Artificial Sequence: Synthetic casein; 5' sequence + inner sequence + 3' sequence
tagggaagagaaggacatatgatgacgtgatgcgtgtcgtatgtgccttgtgcttgactagtacatgaccacttga

SEQ ID NO: 51814 - DNA, 76 bp, Artificial Sequence; identical to SEQ ID NO: 23736
  Description of Artificial Sequence: Synthetic casein; 5' sequence + inner sequence + 3' sequence

SEQ ID NO: 51815 - DNA, 76 bp, Artificial Sequence; identical to SEQ ID NO: 47580
  Description of Artificial Sequence: Synthetic casein; 5' sequence + inner sequence + 3' sequence

SEQ ID NO: 51816 - DNA, 76 bp, Artificial Sequence; identical to SEQ ID NO: 47635
  Description of Artificial Sequence: Synthetic casein; 5' sequence + inner sequence + 3' sequence

SEQ ID NO: 51817 - DNA, 76 bp, Artificial Sequence
  Description of Artificial Sequence: Synthetic casein; 5' sequence + inner sequence + 3' sequence
tagggaagagaaggacatatgatccatgcatcacgtcgtcacgcagcctcacgttgactagtacatgaccacttga

SEQ ID NO: 51818 - DNA, 76 bp, Artificial Sequence; identical to SEQ ID NO: 3055
  Description of Artificial Sequence: Synthetic casein; 5' sequence + inner sequence + 3' sequence

SEQ ID NO: 51819 - DNA, 76 bp, Artificial Sequence; identical to SEQ ID NO: 3029
  Description of Artificial Sequence: Synthetic casein; 5' sequence + inner sequence + 3' sequence

SEQ ID NO: 51820 - DNA, 76 bp, Artificial Sequence
  Description of Artificial Sequence: Synthetic casein; 5' sequence + inner sequence + 3' sequence
tagggaagagaaggacatatgatccatcgcgtcacatggtacggtgcgacacgttgactagtacatgaccacttga

SEQ ID NO: 51821 - DNA, 76 bp, Artificial Sequence; identical to SEQ ID NO: 35341
  Description of Artificial Sequence: Synthetic casein; 5' sequence + inner sequence + 3' sequence

SEQ ID NO: 51822 - DNA, 76 bp, Artificial Sequence
  Description of Artificial Sequence: Synthetic casein; 5' sequence + inner sequence + 3' sequence
tagggaagagaaggacatatgatcacgccacatcgtgacatagggcatgcgcgttgactagtacatgaccacttga

SEQ ID NO: 51823 - DNA, 76 bp, Artificial Sequence; identical to SEQ ID NO: 3553
  Description of Artificial Sequence: Synthetic casein; 5' sequence + inner sequence + 3' sequence

SEQ ID NO: 51824 - DNA, 76 bp, Artificial Sequence
  Description of Artificial Sequence: Synthetic casein; 5' sequence + inner sequence + 3' sequence
tagggaagagaaggacatatgatcacgtcacgcatcagatgtcgcacttcacgttgactagtacatgaccacttga

SEQ ID NO: 51825 - DNA, 76 bp, Artificial Sequence; identical to SEQ ID NO: 47732
  Description of Artificial Sequence: Synthetic casein; 5' sequence + inner sequence + 3' sequence

SEQ ID NO: 51826 - DNA, 76 bp, Artificial Sequence; identical to SEQ ID NO: 19866
  Description of Artificial Sequence: Synthetic casein; 5' sequence + inner sequence + 3' sequence

SEQ ID NO: 51827 - DNA, 76 bp, Artificial Sequence
  Description of Artificial Sequence: Synthetic casein; 5' sequence + inner sequence + 3' sequence
tagggaagagaaggacatatgatgcgatgaagcatgcgtacgtcctgcgcacgttgactagtacatgaccacttga

SEQ ID NO: 51828 - DNA, 76 bp, Artificial Sequence
  Description of Artificial Sequence: Synthetic casein; 5' sequence + inner sequence + 3' sequence
tagggaagagaaggacatatgatgtcacgcaggacgatgcgatgtgcttcgcgttgactagtacatgaccacttga

SEQ ID NO: 51829 - DNA, 76 bp, Artificial Sequence; identical to SEQ ID NO: 23946
  Description of Artificial Sequence: Synthetic casein; 5' sequence + inner sequence + 3' sequence

SEQ ID NO: 51830 - DNA, 76 bp, Artificial Sequence; identical to SEQ ID NO: 3488
  Description of Artificial Sequence: Synthetic casein; 5' sequence + inner sequence + 3' sequence

SEQ ID NO: 51831 - DNA, 76 bp, Artificial Sequence
  Description of Artificial Sequence: Synthetic casein; 5' sequence + inner sequence + 3' sequence
tagggaagagaaggacatatgatgacacgtcacgatgcacgtactacgacacgttgactagtacatgaccacttga

SEQ ID NO: 51832 - DNA, 76 bp, Artificial Sequence; identical to SEQ ID NO: 3429
  Description of Artificial Sequence: Synthetic casein; 5' sequence + inner sequence + 3' sequence

SEQ ID NO: 51833 - DNA, 76 bp, Artificial Sequence; identical to SEQ ID NO: 47953
  Description of Artificial Sequence: Synthetic casein; 5' sequence + inner sequence + 3' sequence

SEQ ID NO: 51834 - DNA, 76 bp, Artificial Sequence; identical to SEQ ID NO: 19561
  Description of Artificial Sequence: Synthetic casein; 5' sequence + inner sequence + 3' sequence

SEQ ID NO: 51835 - DNA, 76 bp, Artificial Sequence
  Description of Artificial Sequence: Synthetic casein; 5' sequence + inner sequence + 3' sequence
tagggaagagaaggacatatgatgccgtgacgatgacgtgttggacatgcaccttgactagtacatgaccacttga

SEQ ID NO: 51836 - DNA, 76 bp, Artificial Sequence
  Description of Artificial Sequence: Synthetic casein; 5' sequence + inner sequence + 3' sequence
tagggaagagaaggacatatgatgcgtgacatggcaggcacacgttacgcacattgactagtacatgaccacttga

SEQ ID NO: 51837 - DNA, 76 bp, Artificial Sequence
  Description of Artificial Sequence: Synthetic casein; 5' sequence + inner sequence + 3' sequence
tagggaagagaaggacatatgatgcatcgtgcagcacgtccactcgatgcacgttgactagtacatgaccacttga

SEQ ID NO: 51838 - DNA, 76 bp, Artificial Sequence; identical to SEQ ID NO: 47889
  Description of Artificial Sequence: Synthetic casein; 5' sequence + inner sequence + 3' sequence

SEQ ID NO: 51839 - DNA, 76 bp, Artificial Sequence; identical to SEQ ID NO: 31595
  Description of Artificial Sequence: Synthetic casein; 5' sequence + inner sequence + 3' sequence

SEQ ID NO: 51840 - DNA, 76 bp, Artificial Sequence
  Description of Artificial Sequence: Synthetic casein; 5' sequence + inner sequence + 3' sequence
tagggaagagaaggacatatgatgcatacgacatcgatacgtaccgctgcacgttgactagtacatgaccacttga

SEQ ID NO: 51841 - DNA, 76 bp, Artificial Sequence; identical to SEQ ID NO: 47643
  Description of Artificial Sequence: Synthetic casein; 5' sequence + inner sequence + 3' sequence

SEQ ID NO: 51842 - DNA, 78 bp, Artificial Sequence
  Description of Artificial Sequence: Synthetic casein; 5' sequence + inner sequence + 3' sequence
tagggaagagaaggacatatgatgtcactgtgcctgaccgtcaagttgcggcatgttgactagtacatgaccacttga

SEQ ID NO: 51843 - DNA, 76 bp, Artificial Sequence; identical to SEQ ID NO: 23594
  Description of Artificial Sequence: Synthetic casein; 5' sequence + inner sequence + 3' sequence

SEQ ID NO: 51844 - DNA, 76 bp, Artificial Sequence
  Description of Artificial Sequence: Synthetic casein; 5' sequence + inner sequence + 3' sequence
tagggaagagaaggacatatgatgcgtgacgatacgtaccgatgtgatgcgcattgactagtacatgaccacttga

SEQ ID NO: 51845 - DNA, 76 bp, Artificial Sequence
  Description of Artificial Sequence: Synthetic casein; 5' sequence + inner sequence + 3' sequence
tagggaagagaaggacatatgatgcaacacgatgcaccgtacggatcggcacgttgactagtacatgaccacttga

SEQ ID NO: 51846 - DNA, 76 bp, Artificial Sequence
  Description of Artificial Sequence: Synthetic casein; 5' sequence + inner sequence + 3' sequence
tagggaagagaaggacatatgatggacgcaacgtaccgtatcgtggccctgtattgactagtacatgaccacttga

SEQ ID NO: 51847 - DNA, 76 bp, Artificial Sequence
  Description of Artificial Sequence: Synthetic casein; 5' sequence + inner sequence + 3' sequence
tagggaagagaaggacatatgatgcatacggcacaggcagcacgtacgccacgttgactagtacatgaccacttga

SEQ ID NO: 51848 - DNA, 76 bp, Artificial Sequence; identical to SEQ ID NO: 3292
  Description of Artificial Sequence: Synthetic casein; 5' sequence + inner sequence + 3' sequence

SEQ ID NO: 51849 - DNA, 76 bp, Artificial Sequence; identical to SEQ ID NO: 23343
  Description of Artificial Sequence: Synthetic casein; 5' sequence + inner sequence + 3' sequence

SEQ ID NO: 51850 - DNA, 76 bp, Artificial Sequence; identical to SEQ ID NO: 23690
  Description of Artificial Sequence: Synthetic casein; 5' sequence + inner sequence + 3' sequence

SEQ ID NO: 51851 - DNA, 76 bp, Artificial Sequence; identical to SEQ ID NO: 19692
  Description of Artificial Sequence: Synthetic casein; 5' sequence + inner sequence + 3' sequence

SEQ ID NO: 51852 - DNA, 76 bp, Artificial Sequence
  Description of Artificial Sequence: Synthetic casein; 5' sequence + inner sequence + 3' sequence
tagggaagagaaggacatatgatcgtgccgaacggatcgtatgacgtgacgcattgactagtacatgaccacttga

SEQ ID NO: 51853 - DNA, 76 bp, Artificial Sequence; identical to SEQ ID NO: 23700
  Description of Artificial Sequence: Synthetic casein; 5' sequence + inner sequence + 3' sequence

SEQ ID NO: 51854 - DNA, 76 bp, Artificial Sequence; identical to SEQ ID NO: 23353
  Description of Artificial Sequence: Synthetic casein; 5' sequence + inner sequence + 3' sequence

SEQ ID NO: 51855 - DNA, 76 bp, Artificial Sequence; identical to SEQ ID NO: 3196
  Description of Artificial Sequence: Synthetic casein; 5' sequence + inner sequence + 3' sequence

SEQ ID NO: 51856 - DNA, 76 bp, Artificial Sequence
  Description of Artificial Sequence: Synthetic casein; 5' sequence + inner sequence + 3' sequence
tagggaagagaaggacatatgatgcacgcaacgtaccgtatcgtggccatgtattgactagtacatgaccacttga

SEQ ID NO: 51857 - DNA, 76 bp, Artificial Sequence; identical to SEQ ID NO: 39827
  Description of Artificial Sequence: Synthetic casein; 5' sequence + inner sequence + 3' sequence

SEQ ID NO: 51858 - DNA, 76 bp, Artificial Sequence
  Description of Artificial Sequence: Synthetic casein; 5' sequence + inner sequence + 3' sequence
tagggaagagaaggacatatgatggacgcaacgtcccgtatcgtggccatgtgttgactagtacatgaccacttga

SEQ ID NO: 51859 - DNA, 76 bp, Artificial Sequence; identical to SEQ ID NO: 47901
  Description of Artificial Sequence: Synthetic casein; 5' sequence + inner sequence + 3' sequence

SEQ ID NO: 51860 - DNA, 76 bp, Artificial Sequence; identical to SEQ ID NO: 11949
  Description of Artificial Sequence: Synthetic casein; 5' sequence + inner sequence + 3' sequence

SEQ ID NO: 51861 - DNA, 76 bp, Artificial Sequence
  Description of Artificial Sequence: Synthetic casein; 5' sequence + inner sequence + 3' sequence
tagggaagagaaggacatatgatcacgtccacacgcgatgcatcacgtacgcattgactagtacatgaccacttga

SEQ ID NO: 51862 - DNA, 76 bp, Artificial Sequence
  Description of Artificial Sequence: Synthetic casein; 5' sequence + inner sequence + 3' sequence
tagggaagagaaggacatatgatcgtaacgcacgatgcacggtatgtggcacattgactagtacatgaccacttga

SEQ ID NO: 51863 - DNA, 76 bp, Artificial Sequence; identical to SEQ ID NO: 19715
  Description of Artificial Sequence: Synthetic casein; 5' sequence + inner sequence + 3' sequence

SEQ ID NO: 51864 - DNA, 76 bp, Artificial Sequence
  Description of Artificial Sequence: Synthetic casein; 5' sequence + inner sequence + 3' sequence
tagggaagagaaggacatatgatcgtgacacggtgcgtgacgttacctgcgcgttgactagtacatgaccacttga

SEQ ID NO: 51865 - DNA, 76 bp, Artificial Sequence; identical to SEQ ID NO: 3505
  Description of Artificial Sequence: Synthetic casein; 5' sequence + inner sequence + 3' sequence

SEQ ID NO: 51866 - DNA, 76 bp, Artificial Sequence
  Description of Artificial Sequence: Synthetic casein; 5' sequence + inner sequence + 3' sequence
tagggaagagaaggacatatgatggacgcatcgtaccgtatcgtggccatgtgttgactagtacatgaccacttga

SEQ ID NO: 51867 - DNA, 71 bp, Artificial Sequence; identical to SEQ ID NO: 23741
  Description of Artificial Sequence: Synthetic casein; 5' sequence + inner sequence + 3' sequence

SEQ ID NO: 51868 - DNA, 76 bp, Artificial Sequence; identical to SEQ ID NO: 23974
  Description of Artificial Sequence: Synthetic casein; 5' sequence + inner sequence + 3' sequence

SEQ ID NO: 51869 - DNA, 76 bp, Artificial Sequence; identical to SEQ ID NO: 31864
  Description of Artificial Sequence: Synthetic casein; 5' sequence + inner sequence + 3' sequence

SEQ ID NO: 51870 - DNA, 76 bp, Artificial Sequence; identical to SEQ ID NO: 3167
  Description of Artificial Sequence: Synthetic casein; 5' sequence + inner sequence + 3' sequence

SEQ ID NO: 51871 - DNA, 76 bp, Artificial Sequence; identical to SEQ ID NO: 31620
  Description of Artificial Sequence: Synthetic casein; 5' sequence + inner sequence + 3' sequence

SEQ ID NO: 51872 - DNA, 76 bp, Artificial Sequence
  Description of Artificial Sequence: Synthetic casein; 5' sequence + inner sequence + 3' sequence
tagggaagagaaggacatatgatgcgtcaggatggacgtactctcacgtcacgttgactagtacatgaccacttga

SEQ ID NO: 51873 - DNA, 76 bp, Artificial Sequence; identical to SEQ ID NO: 31848
  Description of Artificial Sequence: Synthetic casein; 5' sequence + inner sequence + 3' sequence

SEQ ID NO: 51874 - DNA, 76 bp, Artificial Sequence; identical to SEQ ID NO: 19750
  Description of Artificial Sequence: Synthetic casein; 5' sequence + inner sequence + 3' sequence

SEQ ID NO: 51875 - DNA, 75 bp, Artificial Sequence; identical to SEQ ID NO: 3549
  Description of Artificial Sequence: Synthetic casein; 5' sequence + inner sequence + 3' sequence

SEQ ID NO: 51876 - DNA, 76 bp, Artificial Sequence
  Description of Artificial Sequence: Synthetic casein; 5' sequence + inner sequence + 3' sequence
tagggaagagaaggacatatgatcgatgcgcatcgtatcggcacagtgacgcgttgactagtacatgaccacttga

SEQ ID NO: 51877 - DNA, 76 bp, Artificial Sequence
  Description of Artificial Sequence: Synthetic casein; 5' sequence + inner sequence + 3' sequence
tagggaagagaaggacatatgatggccacagcgtacctcaacgtggacgtgcgttgactagtacatgaccacttga

SEQ ID NO: 51878 - DNA, 76 bp, Artificial Sequence
  Description of Artificial Sequence: Synthetic casein; 5' sequence + inner sequence + 3' sequence
tagggaagagaaggacatatgatggcatgcgatgaacgaggcatgttgcgtcattgactagtacatgaccacttga

SEQ ID NO: 51879 - DNA, 76 bp, Artificial Sequence; identical to SEQ ID NO: 3044
  Description of Artificial Sequence: Synthetic casein; 5' sequence + inner sequence + 3' sequence

SEQ ID NO: 51880 - DNA, 76 bp, Artificial Sequence
  Description of Artificial Sequence: Synthetic casein; 5' sequence + inner sequence + 3' sequence
tagggaagagaaggacatatgatgcgtcacacgtagcgttacgggacggcacgttgactagtacatgaccacttga

SEQ ID NO: 51881 - DNA, 75 bp, Artificial Sequence; identical to SEQ ID NO: 7869
  Description of Artificial Sequence: Synthetic casein; 5' sequence + inner sequence + 3' sequence

SEQ ID NO: 51882 - DNA, 76 bp, Artificial Sequence; identical to SEQ ID NO: 3185
  Description of Artificial Sequence: Synthetic casein; 5' sequence + inner sequence + 3' sequence

SEQ ID NO: 51883 - DNA, 75 bp, Artificial Sequence
  Description of Artificial Sequence: Synthetic casein; 5' sequence + inner sequence + 3' sequence
tagggaagagaaggacatatgatgcgtgccatcgtacgtatcgcactgtgcattgactagtacatgaccacttga

SEQ ID NO: 51884 - DNA, 76 bp, Artificial Sequence; identical to SEQ ID NO: 23913
  Description of Artificial Sequence: Synthetic casein; 5' sequence + inner sequence + 3' sequence

SEQ ID NO: 51885 - DNA, 76 bp, Artificial Sequence
  Description of Artificial Sequence: Synthetic casein; 5' sequence + inner sequence + 3' sequence
tagggaagagaaggacatatgatcgtgttgcacgtactcatgctgccttcgcgttgactagtacatgaccacttga

SEQ ID NO: 51886 - DNA, 76 bp, Artificial Sequence
  Description of Artificial Sequence: Synthetic casein; 5' sequence + inner sequence + 3' sequence
tagggaagagaaggacatatgatcgacatgtcgcactgaccgtcacgtacacgttgactagtacatgaccacttga

SEQ ID NO: 51887 - DNA, 76 bp, Artificial Sequence; identical to SEQ ID NO: 3186
  Description of Artificial Sequence: Synthetic casein; 5' sequence + inner sequence + 3' sequence

SEQ ID NO: 51888 - DNA, 76 bp, Artificial Sequence
  Description of Artificial Sequence: Synthetic casein; 5' sequence + inner sequence + 3' sequence
tagggaagagaaggacatatgatcgtacgtacgcaggcacgttcccgttcgtgttgactagtacatgaccacttga

SEQ ID NO: 51889 - DNA, 76 bp, Artificial Sequence; identical to SEQ ID NO: 23528
  Description of Artificial Sequence: Synthetic casein; 5' sequence + inner sequence + 3' sequence

SEQ ID NO: 51890 - DNA, 76 bp, Artificial Sequence
  Description of Artificial Sequence: Synthetic casein; 5' sequence + inner sequence + 3' sequence
tagggaagagaaggacatatgatgcgacgtggcgtaacgtatcgtgcttcgtcttgactagtacatgaccacttga

SEQ ID NO: 51891 - DNA, 76 bp, Artificial Sequence; identical to SEQ ID NO: 35304
  Description of Artificial Sequence: Synthetic casein; 5' sequence + inner sequence + 3' sequence

SEQ ID NO: 51892 - DNA, 76 bp, Artificial Sequence
  Description of Artificial Sequence: Synthetic casein; 5' sequence + inner sequence + 3' sequence
tagggaagagaaggacatatgatacgtgcaggacgacgtgcgtgacgtacgccttgactagtacatgaccacttga

SEQ ID NO: 51893 - DNA, 76 bp, Artificial Sequence; identical to SEQ ID NO: 47301
  Description of Artificial Sequence: Synthetic casein; 5' sequence + inner sequence + 3' sequence

SEQ ID NO: 51894 - DNA, 76 bp, Artificial Sequence
  Description of Artificial Sequence: Synthetic casein; 5' sequence + inner sequence + 3' sequence
tagggaagagaaggacatatgatacgtgcatgtgacgtgtcgtgcagttcgcattgactagtacatgaccacttga

SEQ ID NO: 51895 - DNA, 76 bp, Artificial Sequence
  Description of Artificial Sequence: Synthetic casein; 5' sequence + inner sequence + 3' sequence
tagggaagagaaggacatatgatccgtcacacacaaggcacgtacgttgcacgttgactagtacatgaccacttga

SEQ ID NO: 51896 - DNA, 76 bp, Artificial Sequence; identical to SEQ ID NO: 3181
  Description of Artificial Sequence: Synthetic casein; 5' sequence + inner sequence + 3' sequence

SEQ ID NO: 51897 - DNA, 76 bp, Artificial Sequence; identical to SEQ ID NO: 23733
  Description of Artificial Sequence: Synthetic casein; 5' sequence + inner sequence + 3' sequence

SEQ ID NO: 51898 - DNA, 76 bp, Artificial Sequence; identical to SEQ ID NO: 47688
  Description of Artificial Sequence: Synthetic casein; 5' sequence + inner sequence + 3' sequence

SEQ ID NO: 51899 - DNA, 76 bp, Artificial Sequence
  Description of Artificial Sequence: Synthetic casein; 5' sequence + inner sequence + 3' sequence
tagggaagagaaggacatatgatggacacagcgtacctcaacgtggacgcgcattgactagtacatgaccacttga

SEQ ID NO: 51900 - DNA, 76 bp, Artificial Sequence
  Description of Artificial Sequence: Synthetic casein; 5' sequence + inner sequence + 3' sequence
tagggaagagaaggacatatgatgcgatacggcatgaccgttgctacgtcacgttgactagtacatgaccacttga

SEQ ID NO: 51901 - DNA, 76 bp, Artificial Sequence
  Description of Artificial Sequence: Synthetic casein; 5' sequence + inner sequence + 3' sequence
tagggaagagaaggacatatgatggacacagcgtacctcaacgtggccgtgcattgactagtacatgaccacttga

SEQ ID NO: 51902 - DNA, 76 bp, Artificial Sequence; identical to SEQ ID NO: 3168
  Description of Artificial Sequence: Synthetic casein; 5' sequence + inner sequence + 3' sequence

SEQ ID NO: 51903 - DNA, 76 bp, Artificial Sequence; identical to SEQ ID NO: 3103
  Description of Artificial Sequence: Synthetic casein; 5' sequence + inner sequence + 3' sequence

SEQ ID NO: 51904 - DNA, 76 bp, Artificial Sequence; identical to SEQ ID NO: 31948
  Description of Artificial Sequence: Synthetic casein; 5' sequence + inner sequence + 3' sequence

SEQ ID NO: 51905 - DNA, 74 bp, Artificial Sequence
  Description of Artificial Sequence: Synthetic casein; 5' sequence + inner sequence + 3' sequence
tagggaagagaaggacatatgatgtcatgcacgaacactatcatggcggcattgactagtacatgaccacttga

SEQ ID NO: 51906 - DNA, 76 bp, Artificial Sequence
  Description of Artificial Sequence: Synthetic casein; 5' sequence + inner sequence + 3' sequence
tagggaagagaaggacatatgatcacgcatgtcgcatcgtccctaccgtcacgttgactagtacatgaccacttga

SEQ ID NO: 51907 - DNA, 76 bp, Artificial Sequence
  Description of Artificial Sequence: Synthetic casein; 5' sequence + inner sequence + 3' sequence
tagggaagagaaggacatatgatgcgatgcggtacgtcacactgtccgccacattgactagtacatgaccacttga

SEQ ID NO: 51908 - DNA, 76 bp, Artificial Sequence; identical to SEQ ID NO: 31771
  Description of Artificial Sequence: Synthetic casein; 5' sequence + inner sequence + 3' sequence

SEQ ID NO: 51909 - DNA, 76 bp, Artificial Sequence
  Description of Artificial Sequence: Synthetic casein; 5' sequence + inner sequence + 3' sequence
tagggaagagaaggacatatgatggacgcaacgtaccgtatcgtgaccatgtattgactagtacatgaccacttga

SEQ ID NO: 51910 - DNA, 76 bp, Artificial Sequence
  Description of Artificial Sequence: Synthetic casein; 5' sequence + inner sequence + 3' sequence
tagggaagagaaggacatatgatggcattcacgcacctacacgtgggcacgtattgactagtacatgaccacttga

SEQ ID NO: 51911 - DNA, 74 bp, Artificial Sequence; identical to SEQ ID NO: 3423
  Description of Artificial Sequence: Synthetic casein; 5' sequence + inner sequence + 3' sequence

SEQ ID NO: 51912 - DNA, 76 bp, Artificial Sequence; identical to SEQ ID NO: 3437
  Description of Artificial Sequence: Synthetic casein; 5' sequence + inner sequence + 3' sequence

SEQ ID NO: 51913 - DNA, 76 bp, Artificial Sequence; identical to SEQ ID NO: 47825
  Description of Artificial Sequence: Synthetic casein; 5' sequence + inner sequence + 3' sequence

SEQ ID NO: 51914 - DNA, 76 bp, Artificial Sequence; identical to SEQ ID NO: 23269
  Description of Artificial Sequence: Synthetic casein; 5' sequence + inner sequence + 3' sequence

SEQ ID NO: 51915 - DNA, 76 bp, Artificial Sequence; identical to SEQ ID NO: 7898
  Description of Artificial Sequence: Synthetic casein; 5' sequence + inner sequence + 3' sequence

SEQ ID NO: 51916 - DNA, 76 bp, Artificial Sequence
  Description of Artificial Sequence: Synthetic casein; 5' sequence + inner sequence + 3' sequence
tagggaagagaaggacatatgatggacgcaacgtaccgtatcgcggccatgtgttgactagtacatgaccacttga

SEQ ID NO: 51917 - DNA, 76 bp, Artificial Sequence
  Description of Artificial Sequence: Synthetic casein; 5' sequence + inner sequence + 3' sequence
tagggaagagaaggacatatgatggacgcaacgtaccgtatcgtgggcatgtgttgactagtacatgaccacttga

SEQ ID NO: 51918 - DNA, 76 bp, Artificial Sequence; identical to SEQ ID NO: 47905
  Description of Artificial Sequence: Synthetic casein; 5' sequence + inner sequence + 3' sequence

SEQ ID NO: 51919 - DNA, 76 bp, Artificial Sequence
  Description of Artificial Sequence: Synthetic casein; 5' sequence + inner sequence + 3' sequence
tagggaagagaaggacatatgatggatgcaacgtaccgtatcgtggccatgtgttgactagtacatgaccacttga

SEQ ID NO: 51920 - DNA, 76 bp, Artificial Sequence; identical to SEQ ID NO: 3080
  Description of Artificial Sequence: Synthetic casein; 5' sequence + inner sequence + 3' sequence

SEQ ID NO: 51921 - DNA, 76 bp, Artificial Sequence
  Description of Artificial Sequence: Synthetic casein; 5' sequence + inner sequence + 3' sequence
tagggaagagaaggacatatgatggacacaacgtaccgtatcgtggccatgtgttgactagtacatgaccacttga

SEQ ID NO: 51922 - DNA, 76 bp, Artificial Sequence; identical to SEQ ID NO: 47993
  Description of Artificial Sequence: Synthetic casein; 5' sequence + inner sequence + 3' sequence

SEQ ID NO: 51923 - DNA, 76 bp, Artificial Sequence
  Description of Artificial Sequence: Synthetic casein; 5' sequence + inner sequence + 3' sequence
tagggaagagaaggacatatgatcgtgacacggtacgcatcgtatgtgtgatgttgactagtacatgaccacttga

SEQ ID NO: 51924 - DNA, 76 bp, Artificial Sequence
  Description of Artificial Sequence: Synthetic casein; 5' sequence + inner sequence + 3' sequence
tagggaagagaaggacatatgatgacgtaacgcgttacggtgtcgcatgcacgttgactagtacatgaccacttga

SEQ ID NO: 51925 - DNA, 76 bp, Artificial Sequence; identical to SEQ ID NO: 47737
  Description of Artificial Sequence: Synthetic casein; 5' sequence + inner sequence + 3' sequence

SEQ ID NO: 51926 - DNA, 76 bp, Artificial Sequence; identical to SEQ ID NO: 3311
  Description of Artificial Sequence: Synthetic casein; 5' sequence + inner sequence + 3' sequence

SEQ ID NO: 51927 - DNA, 76 bp, Artificial Sequence; identical to SEQ ID NO: 15996
  Description of Artificial Sequence: Synthetic casein; 5' sequence + inner sequence + 3' sequence

SEQ ID NO: 51928 - DNA, 76 bp, Artificial Sequence
  Description of Artificial Sequence: Synthetic casein; 5' sequence + inner sequence + 3' sequence
tagggaagagaaggacatatgatggccacagcgtaacgttcgagtggtacgtattgactagtacatgaccacttga

SEQ ID NO: 51929 - DNA, 76 bp, Artificial Sequence; identical to SEQ ID NO: 47650
  Description of Artificial Sequence: Synthetic casein; 5' sequence + inner sequence + 3' sequence

SEQ ID NO: 51930 - DNA, 76 bp, Artificial Sequence; identical to SEQ ID NO: 31830
  Description of Artificial Sequence: Synthetic casein; 5' sequence + inner sequence + 3' sequence

SEQ ID NO: 51931 - DNA, 76 bp, Artificial Sequence
  Description of Artificial Sequence: Synthetic casein; 5' sequence + inner sequence + 3' sequence
tagggaagagaaggacatatgatgcacacggtacgtacggcacgatatgcgcgttgactagtacatgaccacttga

SEQ ID NO: 51932 - DNA, 76 bp, Artificial Sequence
  Description of Artificial Sequence: Synthetic casein; 5' sequence + inner sequence + 3' sequence
tagggaagagaaggacatatgatgcacgactcgcaccctatcatgaggccatattgactagtacatgaccacttga

SEQ ID NO: 51933 - DNA, 76 bp, Artificial Sequence
  Description of Artificial Sequence: Synthetic casein; 5' sequence + inner sequence + 3' sequence
tagggaagagaaggacatatgatcacgcaatgacgtgtgagcatgacgtcgcgttgactagtacatgaccacttga

SEQ ID NO: 51934 - DNA, 76 bp, Artificial Sequence; identical to SEQ ID NO: 31674
  Description of Artificial Sequence: Synthetic casein; 5' sequence + inner sequence + 3' sequence

SEQ ID NO: 51935 - DNA, 76 bp, Artificial Sequence; identical to SEQ ID NO: 19627
  Description of Artificial Sequence: Synthetic casein; 5' sequence + inner sequence + 3' sequence

SEQ ID NO: 51936 - DNA, 76 bp, Artificial Sequence; identical to SEQ ID NO: 3365
  Description of Artificial Sequence: Synthetic casein; 5' sequence + inner sequence + 3' sequence

SEQ ID NO: 51937 - DNA, 76 bp, Artificial Sequence; identical to SEQ ID NO: 23787
  Description of Artificial Sequence: Synthetic casein; 5' sequence + inner sequence + 3' sequence

SEQ ID NO: 51938 - DNA, 76 bp, Artificial Sequence
  Description of Artificial Sequence: Synthetic casein; 5' sequence + inner sequence + 3' sequence
tagggaagagaaggacatatgatcgatacgcgtcacgatacgtagcatgcgcattgactagtacatgaccacttga

SEQ ID NO: 51939 - DNA, 76 bp, Artificial Sequence
  Description of Artificial Sequence: Synthetic casein; 5' sequence + inner sequence + 3' sequence
tagggaagagaaggacatatgatcgacacgatgcatgcgtaccgtctgcaccattgactagtacatgaccacttga

SEQ ID NO: 51940 - DNA, 76 bp, Artificial Sequence; identical to SEQ ID NO: 23964
  Description of Artificial Sequence: Synthetic casein; 5' sequence + inner sequence + 3' sequence

SEQ ID NO: 51941 - DNA, 76 bp, Artificial Sequence; identical to SEQ ID NO: 23708
  Description of Artificial Sequence: Synthetic casein; 5' sequence + inner sequence + 3' sequence

SEQ ID NO: 51942 - DNA, 75 bp, Artificial Sequence; identical to SEQ ID NO: 3193
  Description of Artificial Sequence: Synthetic casein; 5' sequence + inner sequence + 3' sequence

SEQ ID NO: 51943 - DNA, 76 bp, Artificial Sequence; identical to SEQ ID NO: 35379
  Description of Artificial Sequence: Synthetic casein; 5' sequence + inner sequence + 3' sequence

SEQ ID NO: 51944 - DNA, 76 bp, Artificial Sequence
  Description of Artificial Sequence: Synthetic casein; 5' sequence + inner sequence + 3' sequence
tagggaagagaaggacatatgatcgtcacgcaaggagggacatgtgcttcgcgttgactagtacatgaccacttga

SEQ ID NO: 51945 - DNA, 74 bp, Artificial Sequence
  Description of Artificial Sequence: Synthetic casein; 5' sequence + inner sequence + 3' sequence
tagggaagagaaggacatatgatggacgcaacgtaacgtatcgtggccatgttgactagtacatgaccacttga

SEQ ID NO: 51946 - DNA, 76 bp, Artificial Sequence
  Description of Artificial Sequence: Synthetic casein; 5' sequence + inner sequence + 3' sequence
tagggaagagaaggacatatgatgcgatcgcaacgcaacgtgtgtacgtatcgttgactagtacatgaccacttga

SEQ ID NO: 51947 - DNA, 76 bp, Artificial Sequence
  Description of Artificial Sequence: Synthetic casein; 5' sequence + inner sequence + 3' sequence
tagggaagagaaggacatatgatgcacgtcacgccctgatgtgtcacggcacattgactagtacatgaccacttga

SEQ ID NO: 51948 - DNA, 76 bp, Artificial Sequence; identical to SEQ ID NO: 47583
  Description of Artificial Sequence: Synthetic casein; 5' sequence + inner sequence + 3' sequence

SEQ ID NO: 51949 - DNA, 76 bp, Artificial Sequence; identical to SEQ ID NO: 47918
  Description of Artificial Sequence: Synthetic casein; 5' sequence + inner sequence + 3' sequence

SEQ ID NO: 51950 - DNA, 76 bp, Artificial Sequence
  Description of Artificial Sequence: Synthetic casein; 5' sequence + inner sequence + 3' sequence
tagggaagagaaggacatatgattcacgactcgcaccctatcatgtaggcatgttgactagtacatgaccacttga

SEQ ID NO: 51951 - DNA, 76 bp, Artificial Sequence; identical to SEQ ID NO: 23475
  Description of Artificial Sequence: Synthetic casein; 5' sequence + inner sequence + 3' sequence

SEQ ID NO: 51952 - DNA, 76 bp, Artificial Sequence; identical to SEQ ID NO: 47864
  Description of Artificial Sequence: Synthetic casein; 5' sequence + inner sequence + 3' sequence

SEQ ID NO: 51953 - DNA, 76 bp, Artificial Sequence
  Description of Artificial Sequence: Synthetic casein; 5' sequence + inner sequence + 3' sequence
tagggaagagaaggacatatgatcatgcgcagtgacgtacgtgcatgttcatgttgactagtacatgaccacttga

SEQ ID NO: 51954 - DNA, 76 bp, Artificial Sequence
  Description of Artificial Sequence: Synthetic casein; 5' sequence + inner sequence + 3' sequence
tagggaagagaaggacatatgatggccacaacgtacctcaacgtggacgtgcattgactagtacatgaccacttga

SEQ ID NO: 51955 - DNA, 76 bp, Artificial Sequence; identical to SEQ ID NO: 23691
  Description of Artificial Sequence: Synthetic casein; 5' sequence + inner sequence + 3' sequence

SEQ ID NO: 51956 - DNA, 74 bp, Artificial Sequence
  Description of Artificial Sequence: Synthetic casein; 5' sequence + inner sequence + 3' sequence
tagggaagagaaggacatatgatggactcaacgtaccgtatcgtggccatgttgactagtacatgaccacttga

SEQ ID NO: 51957 - DNA, 76 bp, Artificial Sequence; identical to SEQ ID NO: 35802
  Description of Artificial Sequence: Synthetic casein; 5' sequence + inner sequence + 3' sequence

SEQ ID NO: 51958 - DNA, 76 bp, Artificial Sequence; identical to SEQ ID NO: 3203
  Description of Artificial Sequence: Synthetic casein; 5' sequence + inner sequence + 3' sequence

SEQ ID NO: 51959 - DNA, 76 bp, Artificial Sequence
  Description of Artificial Sequence: Synthetic casein; 5' sequence + inner sequence + 3' sequence
tagggaagagaaggacatatgatcgtgacgacgtagtgtcctgtcgcatcacgttgactagtacatgaccacttga

SEQ ID NO: 51960 - DNA, 76 bp, Artificial Sequence
  Description of Artificial Sequence: Synthetic casein; 5' sequence + inner sequence + 3' sequence
tagggaagagaaggacatatgatcgacaccacgctacgtcacgttacggcacattgactagtacatgaccacttga

SEQ ID NO: 51961 - DNA, 76 bp, Artificial Sequence
  Description of Artificial Sequence: Synthetic casein; 5' sequence + inner sequence + 3' sequence
tagggaagagaaggacatatgatccatgcatcgtaacgcatcgtaccggcacgttgactagtacatgaccacttga

SEQ ID NO: 51962 - DNA, 76 bp, Artificial Sequence; identical to SEQ ID NO: 47975
  Description of Artificial Sequence: Synthetic casein; 5' sequence + inner sequence + 3' sequence

SEQ ID NO: 51963 - DNA, 76 bp, Artificial Sequence; identical to SEQ ID NO: 3449
  Description of Artificial Sequence: Synthetic casein; 5' sequence + inner sequence + 3' sequence

SEQ ID NO: 51964 - DNA, 76 bp, Artificial Sequence
  Description of Artificial Sequence: Synthetic casein; 5' sequence + inner sequence + 3' sequence
tagggaagagaaggacatatgatggacgcaacgtaccgcatcgtggccatgcgttgactagtacatgaccacttga

SEQ ID NO: 51965 - DNA, 76 bp, Artificial Sequence; identical to SEQ ID NO: 47804
  Description of Artificial Sequence: Synthetic casein; 5' sequence + inner sequence + 3' sequence

SEQ ID NO: 51966 - DNA, 76 bp, Artificial Sequence
  Description of Artificial Sequence: Synthetic casein; 5' sequence + inner sequence + 3' sequence
tagggaagagaaggacatatgatcgatacgcgtaaggcaatgcgtactgcacgttgactagtacatgaccacttga

SEQ ID NO: 51967 - DNA, 76 bp, Artificial Sequence; identical to SEQ ID NO: 3178
  Description of Artificial Sequence: Synthetic casein; 5' sequence + inner sequence + 3' sequence

SEQ ID NO: 51968 - DNA, 76 bp, Artificial Sequence
  Description of Artificial Sequence: Synthetic casein; 5' sequence + inner sequence + 3' sequence
tagggaagagaaggacatatgatgcgtcacggaccgtacgttgtcactgcgtattgactagtacatgaccacttga

SEQ ID NO: 51969 - DNA, 76 bp, Artificial Sequence; identical to SEQ ID NO: 31574
  Description of Artificial Sequence: Synthetic casein; 5' sequence + inner sequence + 3' sequence

SEQ ID NO: 51970 - DNA, 74 bp, Artificial Sequence
  Description of Artificial Sequence: Synthetic casein; 5' sequence + inner sequence + 3' sequence
tagggaagagaaggacatatgatggacgcaccgtaccgtatcgtggccatgttgactagtacatgaccacttga

SEQ ID NO: 51971 - DNA, 76 bp, Artificial Sequence; identical to SEQ ID NO: 3024
  Description of Artificial Sequence: Synthetic casein; 5' sequence + inner sequence + 3' sequence

SEQ ID NO: 51972 - DNA, 76 bp, Artificial Sequence; identical to SEQ ID NO: 47883
  Description of Artificial Sequence: Synthetic casein; 5' sequence + inner sequence + 3' sequence

SEQ ID NO: 51973 - DNA, 76 bp, Artificial Sequence; identical to SEQ ID NO: 19555
  Description of Artificial Sequence: Synthetic casein; 5' sequence + inner sequence + 3' sequence

SEQ ID NO: 51974 - DNA, 76 bp, Artificial Sequence
  Description of Artificial Sequence: Synthetic casein; 5' sequence + inner sequence + 3' sequence
tagggaagagaaggacatatgatacgcatcacacgtgtcgtacgtacctcgcgttgactagtacatgaccacttga

SEQ ID NO: 51975 - DNA, 76 bp, Artificial Sequence; identical to SEQ ID NO: 3756
  Description of Artificial Sequence: Synthetic casein; 5' sequence + inner sequence + 3' sequence

SEQ ID NO: 51976 - DNA, 76 bp, Artificial Sequence
  Description of Artificial Sequence: Synthetic casein; 5' sequence + inner sequence + 3' sequence
tagggaagagaaggacatatgatgcgtcacgatgatgcgacacggcatgcacattgactagtacatgaccacttga

SEQ ID NO: 51977 - DNA, 76 bp, Artificial Sequence; identical to SEQ ID NO: 23662
  Description of Artificial Sequence: Synthetic casein; 5' sequence + inner sequence + 3' sequence

SEQ ID NO: 51978 - DNA, 76 bp, Artificial Sequence
  Description of Artificial Sequence: Synthetic casein; 5' sequence + inner sequence + 3' sequence
tagggaagagaaggacatatgatgcatcgcagcgttacgcactcgacgtgacattgactagtacatgaccacttga

SEQ ID NO: 51979 - DNA, 76 bp, Artificial Sequence
  Description of Artificial Sequence: Synthetic casein; 5' sequence + inner sequence + 3' sequence
tagggaagagaaggacatatgatgcgtgtagcgtcagtgcatgcgatgacacgttgactagtacatgaccacttga

SEQ ID NO: 51980 - DNA, 76 bp, Artificial Sequence; identical to SEQ ID NO: 23801
  Description of Artificial Sequence: Synthetic casein; 5' sequence + inner sequence + 3' sequence

SEQ ID NO: 51981 - DNA, 76 bp, Artificial Sequence
  Description of Artificial Sequence: Synthetic casein; 5' sequence + inner sequence + 3' sequence
tagggaagagaaggacatatgatggacgcagcgtaacgttcgaggggtacgtattgactagtacatgaccacttga

SEQ ID NO: 51982 - DNA, 76 bp, Artificial Sequence
  Description of Artificial Sequence: Synthetic casein; 5' sequence + inner sequence + 3' sequence
tagggaagagaaggacatatgatgcggcacgacgtaacggacacgacgtcacgttgactagtacatgaccacttga

SEQ ID NO: 51983 - DNA, 76 bp, Artificial Sequence
  Description of Artificial Sequence: Synthetic casein; 5' sequence + inner sequence + 3' sequence
tagggaagagaaggacatatgatggcatgcgaggaacgaggcatgatgcgtcattgactagtacatgaccacttga

SEQ ID NO: 51984 - DNA, 76 bp, Artificial Sequence; identical to SEQ ID NO: 47994
  Description of Artificial Sequence: Synthetic casein; 5' sequence + inner sequence + 3' sequence

SEQ ID NO: 51985 - DNA, 76 bp, Artificial Sequence
  Description of Artificial Sequence: Synthetic casein; 5' sequence + inner sequence + 3' sequence
tagggaagagaaggacatatgatgcgatgcacgtaggtggccttgtcgtcacgttgactagtacatgaccacttga

SEQ ID NO: 51986 - DNA, 76 bp, Artificial Sequence; identical to SEQ ID NO: 47971
  Description of Artificial Sequence: Synthetic casein; 5' sequence + inner sequence + 3' sequence

SEQ ID NO: 51987 - DNA, 76 bp, Artificial Sequence; identical to SEQ ID NO: 3821
  Description of Artificial Sequence: Synthetic casein; 5' sequence + inner sequence + 3' sequence

SEQ ID NO: 51988 - DNA, 76 bp, Artificial Sequence; identical to SEQ ID NO: 47923
  Description of Artificial Sequence: Synthetic casein; 5' sequence + inner sequence + 3' sequence

SEQ ID NO: 51989 - DNA, 76 bp, Artificial Sequence; identical to SEQ ID NO: 3154
  Description of Artificial Sequence: Synthetic casein; 5' sequence + inner sequence + 3' sequence

SEQ ID NO: 51990 - DNA, 76 bp, Artificial Sequence; identical to SEQ ID NO: 47837
  Description of Artificial Sequence: Synthetic casein; 5' sequence + inner sequence + 3' sequence

SEQ ID NO: 51991 - DNA, 77 bp, Artificial Sequence
  Description of Artificial Sequence: Synthetic casein; 5' sequence + inner sequence + 3' sequence
tagggaagagaaggacatatgatcacgtgtcaacgtgcattacgtcgtgacgcgttgactagtacatgaccacttga

SEQ ID NO: 51992 - DNA, 76 bp, Artificial Sequence
  Description of Artificial Sequence: Synthetic casein; 5' sequence + inner sequence + 3' sequence
tagggaagagaaggacatatgatgcacgatgcaacgcgtgtcctcgcgtcacgttgactagtacatgaccacttga

SEQ ID NO: 51993 - DNA, 76 bp, Artificial Sequence
  Description of Artificial Sequence: Synthetic casein; 5' sequence + inner sequence + 3' sequence
tagggaagagaaggacatatgatggacgcaacgtaccgtatcgtggccacgtattgactagtacatgaccacttga

SEQ ID NO: 51994 - DNA, 76 bp, Artificial Sequence
  Description of Artificial Sequence: Synthetic casein; 5' sequence + inner sequence + 3' sequence
tagggaagagaaggacatatgatgcacatgcgacagtacgtacgtatcgcaccttgactagtacatgaccacttga

SEQ ID NO: 51995 - DNA, 76 bp, Artificial Sequence
  Description of Artificial Sequence: Synthetic casein; 5' sequence + inner sequence + 3' sequence
tagggaagagaaggacatatgatacgtacacgtaaggcatcacgtacttcgcattgactagtacatgaccacttga

SEQ ID NO: 51996 - DNA, 76 bp, Artificial Sequence
  Description of Artificial Sequence: Synthetic casein; 5' sequence + inner sequence + 3' sequence
tagggaagagaaggacatatgatgtcacgcacgaacactatcatggcggcatgttgactagtacatgaccacttga

SEQ ID NO: 51997 - DNA, 76 bp, Artificial Sequence
  Description of Artificial Sequence: Synthetic casein; 5' sequence + inner sequence + 3' sequence
tagggaagagaaggacatatgatcacgtcacatgcacgacgattcgcgtggtgttgactagtacatgaccacttga

SEQ ID NO: 51998 - DNA, 76 bp, Artificial Sequence; identical to SEQ ID NO: 3531
  Description of Artificial Sequence: Synthetic casein; 5' sequence + inner sequence + 3' sequence

SEQ ID NO: 51999 - DNA, 76 bp, Artificial Sequence; identical to SEQ ID NO: 3903
  Description of Artificial Sequence: Synthetic casein; 5' sequence + inner sequence + 3' sequence

SEQ ID NO: 52000 - DNA, 76 bp, Artificial Sequence
  Description of Artificial Sequence: Synthetic casein; 5' sequence + inner sequence + 3' sequence
tagggaagagaaggacatatgatcgtgacgcgacgtgacgacatagctgcgtgttgactagtacatgaccacttga

SEQ ID NO: 52001 - DNA, 76 bp, Artificial Sequence
  Description of Artificial Sequence: Synthetic casein; 5' sequence + inner sequence + 3' sequence
tagggaagagaaggacatatgatgcgttacgtgcatcaggccatcacgttgccttgactagtacatgaccacttga

SEQ ID NO: 52002 - DNA, 74 bp, Artificial Sequence
  Description of Artificial Sequence: Synthetic casein; 5' sequence + inner sequence + 3' sequence
tagggaagagaaggacatatgatgcaacgcacgacacgatgtcacgtcgcgttgactagtacatgaccacttga

SEQ ID NO: 52003 - DNA, 15 bp, Artificial Sequence
  Description of Artificial Sequence: Synthetic anchor sequence
aaaaatcaagtggtc

SEQ ID NO: 52004 - DNA, 15 bp, Artificial Sequence
  Description of Artificial Sequence: Synthetic anchor sequence
aaaaatcaagtggtc

SEQ ID NO: 52005 - DNA, 12 bp, Artificial Sequence
  Description of Artificial Sequence: Synthetic anchor sequence
aaaaatcaagtg

SEQ ID NO: 52006 - DNA, 12 bp, Artificial Sequence
  Description of Artificial Sequence: Synthetic anchor sequence
aaaaatcaagtg

SEQ ID NO: 52007 - DNA, 12 bp, Artificial Sequence
  Description of Artificial Sequence: Synthetic anchor sequence
aaaaaagtggtc

SEQ ID NO: 52008 - DNA, 12 bp, Artificial Sequence
  Description of Artificial Sequence: Synthetic anchor sequence
aaaaaagtggtc

SEQ ID NO: 52009 - DNA, 15 bp, Artificial Sequence
  Description of Artificial Sequence: Synthetic anchor sequence
aaaaatcaagaggtc

SEQ ID NO: 52010 - DNA, 15 bp, Artificial Sequence
  Description of Artificial Sequence: Synthetic anchor sequence
aaaaatcaagaggtc

SEQ ID NO: 52011 - DNA, 15 bp, Artificial Sequence
  Description of Artificial Sequence: Synthetic anchor sequence
aaaaatcaacaggtc

SEQ ID NO: 52012 - DNA, 15 bp, Artificial Sequence
  Description of Artificial Sequence: Synthetic anchor sequence
aaaaatcaacaggtc

SEQ ID NO: 52013 - DNA, 15 bp, Artificial Sequence
  Description of Artificial Sequence: Synthetic anchor sequence
aaaaaagtggtcatg

SEQ ID NO: 52014 - DNA, 15 bp, Artificial Sequence
  Description of Artificial Sequence: Synthetic anchor sequence
aaaaaagtggtcatg

SEQ ID NO: 52015 - DNA, 15 bp, Artificial Sequence
  Description of Artificial Sequence: Synthetic anchor sequence
aaaaatggtcatgta

SEQ ID NO: 52016 - DNA, 15 bp, Artificial Sequence
  Description of Artificial Sequence: Synthetic anchor sequence
aaaaatggtcatgta

SEQ ID NO: 52017 - DNA, 12 bp, Artificial Sequence
  Description of Artificial Sequence: Synthetic anchor sequence
aaaaatggtcat

SEQ ID NO: 52018 - DNA, 12 bp, Artificial Sequence
  Description of Artificial Sequence: Synthetic anchor sequence
aaaaatggtcat

SEQ ID NO: 52019 - DNA, 12 bp, Artificial Sequence
  Description of Artificial Sequence: Synthetic anchor sequence
aaaaatcatgta

SEQ ID NO: 52020 - DNA, 12 bp, Artificial Sequence
  Description of Artificial Sequence: Synthetic anchor sequence
aaaaatcatgta

SEQ ID NO: 52021 - DNA, 15 bp, Artificial Sequence
  Description of Artificial Sequence: Synthetic anchor sequence
aaaaatggtcttgta

SEQ ID NO: 52022 - DNA, 15 bp, Artificial Sequence
  Description of Artificial Sequence: Synthetic anchor sequence
aaaaatggtcttgta

SEQ ID NO: 52023 - DNA, 15 bp, Artificial Sequence
  Description of Artificial Sequence: Synthetic anchor sequence
aaaaatggtgttgta

SEQ ID NO: 52024 - DNA, 15 bp, Artificial Sequence
  Description of Artificial Sequence: Synthetic anchor sequence
aaaaatggtgttgta

SEQ ID NO: 52025 - DNA, 15 bp, Artificial Sequence
  Description of Artificial Sequence: Synthetic anchor sequence
aaaaatcatgtacta

SEQ ID NO: 52026 - DNA, 15 bp, Artificial Sequence
  Description of Artificial Sequence: Synthetic anchor sequence
aaaaatcatgtacta

SEQ ID NO: 52027 - DNA, 15 bp, Artificial Sequence
  Description of Artificial Sequence: Synthetic anchor sequence
aaaaactcttcccta

SEQ ID NO: 52028 - DNA, 15 bp, Artificial Sequence
  Description of Artificial Sequence: Synthetic anchor sequence
aaaaactcttcccta

SEQ ID NO: 52029 - DNA, 12 bp, Artificial Sequence
  Description of Artificial Sequence: Synthetic anchor sequence
aaaaactcttcc

SEQ ID NO: 52030 - DNA, 12 bp, Artificial Sequence
  Description of Artificial Sequence: Synthetic anchor sequence
aaaaactcttcc

SEQ ID NO: 52031 - DNA, 12 bp, Artificial Sequence
  Description of Artificial Sequence: Synthetic anchor sequence
aaaaattcccta

SEQ ID NO: 52032 - DNA, 12 bp, Artificial Sequence
  Description of Artificial Sequence: Synthetic anchor sequence
aaaaattcccta

SEQ ID NO: 52033 - DNA, 15 bp, Artificial Sequence
  Description of Artificial Sequence: Synthetic anchor sequence
aaaaactcttgccta

SEQ ID NO: 52034 - DNA, 15 bp, Artificial Sequence
  Description of Artificial Sequence: Synthetic anchor sequence
aaaaactcttgccta

SEQ ID NO: 52035 - DNA, 15 bp, Artificial Sequence
  Description of Artificial Sequence: Synthetic anchor sequence
aaaaactctagccta

SEQ ID NO: 52036 - DNA, 15 bp, Artificial Sequence
  Description of Artificial Sequence: Synthetic anchor sequence
aaaaactctagccta

SEQ ID NO: 52037 - DNA, 15 bp, Artificial Sequence
  Description of Artificial Sequence: Synthetic anchor sequence
aaaaagatcaggcca

SEQ ID NO: 52038 - DNA, 15 bp, Artificial Sequence
  Description of Artificial Sequence: Synthetic anchor sequence
aaaaacacttgcggt

SEQ ID NO: 52039 - DNA, 15 bp, Artificial Sequence
  Description of Artificial Sequence: Synthetic anchor sequence
aaaaacacggacacg

SEQ ID NO: 52040 - DNA, 15 bp, Artificial Sequence
  Description of Artificial Sequence: Synthetic anchor sequence
aaaaaggccatgctt

SEQ ID NO: 52041 - DNA, 15 bp, Artificial Sequence
  Description of Artificial Sequence: Synthetic anchor sequence
aaaaagctgctcatc

SEQ ID NO: 52042 - DNA, 15 bp, Artificial Sequence
  Description of Artificial Sequence: Synthetic anchor sequence
aaaaagaagacacac
